United States Patent Application Publication US 2004/0029129 A1 - sequence listing, part 23

SEQ ID NO: 74576 - protein, 295 aa, Streptococcus pyogenes
MERLRRTMMFVPGANAAMLRDAPLFGADSIMFDLEDSVSLKEKDTSRALVHFALKTFDYSSVETVVRVNGLDSCGALDIEAVVLAGVNVIRLPKTETAQDIIDVEAVIERVERENSIEVGRTRMMAAIESAEGVLNAREIAKASKRLIGIALGAEDYVTNMKTRRYPDGQELFFARSMILHAARAAGIAAIDTVYSDVNNTEGFQNEVRMIKQLGFDGKSVINPRQIPLVNEIYTPTKKEIDHAKQVIWAIREAESKGSGVISLNGKMVDKPIVERAERVIALATAAGVLSEEDI

SEQ ID NO: 74577 - protein, 510 aa, Streptococcus pyogenes
MVTNKLGRDIPQPYADQYGVFEGELANIKQYDESSRRIKPVKPGDSKLLGSVREAIEKTGLTDGMTISFHHHFREGDFIMNMVLEEIAKMGIKNLSIAPSSIANVHEPLIDHIKNGVVTNITSSGLRDKVGAAISEGLMENPVVIRSHGGRARAIASGDIHIDVAFLGAPSSDAYGNVNGTKGKATCGSLGYAMIDAKYADQVVILTDNLVPYPNTPISIPQTDVDYVVTVDAIGDPQGIAKGATRFTKNPKELLIAEYAAKVITNSPYFKEGFSFQTGTGGASLAVTRFMREAMIKENIKASFALGGITNAMVELLEEELVEKILDVQDFDHPSAVSLGKHAEHYEIDANMYASPLSKGAVINQLDTCILSALEVDTNFNVNVMTGSDGVIRGASGGHCDTAFAAKMSLVISPLIRGRIPTFVDEVNTVITPGTSVDVIVTEVGIAINPNRQDLVDHFKSLNVPQFSIEELKEKAYAIVGTPERIQYGDKVVALIEYRDGSLMDVVYNV

SEQ ID NO: 74578 - protein, 356 aa, Streptococcus pyogenes
MRRELLLEKIETYKAIMPWYVLDYYQSKLAVPYSFTTLYEYLKEYKRFFDWLMDADLTQAPKIADIDLSTLEHLTKKDLEAFVLYLRERPSLNTYSTKEGLSQTTINRTLSALSSLYKYLTEEVENDQGEPYFYRNVMKKVSTKKKKETLASRAENIKQKLFLGDETLAFLDYVDKEYEQKLSNRAKSSFRKNKERDLAIIALLLASGVRLSEAVNLDLKDVNLNMMIIEVIRKGGKRDSVNVAGFAKGYLESYLAVRQRRYKAEKQDLAFFLTEYRGVPNRMDASSIEKMVGKYSEDFKIRVTPHKLRHTLATRLYDATKSQVLVSHQLGHSSTQVTDLYTHIVNDEQKNALDNL

SEQ ID NO: 74579 - protein, 519 aa, Streptococcus pyogenes
MAFESLTQRLQDVFKHIRGKKKLSESDVQEVTKEIRLALLEADVALPVVKTFIKRVRERAIGHEIIDTLDPTQQILKIVNEELTSILGSETAEIDKSPKIPTIIMMVGLQGAGKTTFAGKLANKLIKEENARPLMIAADIYRPAAIDQLKTLGQQINVPVFDMGTDHSAVDIVRKGLEQARENHNDYVLIDTAGRLQIDEKLMGELRDVKALAQPNEILLVVDSMIGQEAANVAYEFNHQLSITGVVLTKIDGDTRGGAALSVREITGKPIKFTGIGEKITDIETFHPDRMSSRILGMGDLLTLIEKASQEYDEKKSLELAEKMRENTFDFNDFIEQLDQVQNMGPMEDLLKMIPGMAGNPALANIKVDENQIARKRAIVSSMTPAERENPDLLNPSRRRRIAAGSGNSFVDNKFIKDFNQAKSMMQGVMSGDMSKMMKDMGINPNNLPKNMPAGMPDMSSLEGMMGQGGMPDLSGLGGDMDMSQLFGKGFKGKIGQFAMKQAMKRQANKLKKAKKKRK

SEQ ID NO: 74580 - protein, 113 aa, Streptococcus pyogenes
MNIMEIEKTNRMNALFEFYAALLTDKQMNYIELYYADDYSLAEIADEFGVSRQAVYDNIKRTEKILETYEMKLHMYSDYVVRSEIFDDMIAHYPHDEYLQEKISILTSIDNRE

SEQ ID NO: 74581 - protein, 241 aa, Streptococcus pyogenes
MNNRLEECGMLPAYIKIHDAIKKDIDLGIWPIGSRLPSERHLAEHFTVSRMTLRQAITLLVEEGILERRIGSGTYVASHRVQEKMRGTTSFTEIIRSQGRQPSSKLLSYQKQLASDTEVKELNLDKTDLVIRMERIRYADSVPLVYEIASIPEKFIKTVKRADITEHFFHSLIANGYEIGKSKQTIYAKLASERVASYLEVAKGHAILALTQVSYFTDGKPFEYVRSQYIGDRFEFYLENN

SEQ ID NO: 74582 - protein, 520 aa, Streptococcus pyogenes
MTEISILNDVQKIIVLDYGSQYNQLIARRIREFGVFSELKSHKITAQELREINPIGIVLSGGPNSVYADNAFGIDPEIFELGIPILGICYGMQLITHKLGGKVVPAGQAGNREYGQSTLHLRETSKLFSGTPQEQLVLMSHGDAVTEIPEGFHLVGDSNDCPYAAIENTEKNLYGIQFHPEVRHSVYGNDILKNFAISICGARGDWSMDNFIDMEIAKIRETVGDRKVLLGLSGGVDSSVVGVLLQKAIGDQLTCIFVDHGLLRKDEGDQVMGMLGGKFGLNIIRVDASKRFLDLLADVEDPEKKRKIIGNEFVYVFDDEASKLKGVDFLAQGTLYTDIIESGTETAQTIKSHHNVGGLPEDMQFELIEPLNTLFKDEVRALGIALGMPEEIVWRQPFPGPGLAIRVMGAITEEKLETVRESDAILREEIAKAGLDRDVWQYFTVNTGVRSVGVMGDGRTYDYTIAIRAITSIDGMTADFAQLPWDVLKKISTRIVNEVDHVNRIVYDITSKPPATVEWE

SEQ ID NO: 74583 - protein, 407 aa, Streptococcus pyogenes
MTNLTFYAKIGISEEEHDSFVKEHQQISVLQGSDWAKIKNQWQNERIGIYKEEKQVASLSLLIKLLPLGRSIIYIPRGPVMDYLDRDLVAFTMKTLKDYGKTKKALFIKYDPAILLKQYALGQEEEEKPLALAAIKNLQEAGVHWTGLTMEIADSIQPRFQANIYTQENLEMQFPKHTRRLIKDAKQRGVKTYRVSQSELHKFSKIVSLTEKRKNISLRNEAYFQKLMTTYGDKAYLHLAKVNIPQKLDQYRQQLILINQDITRTQAHQKKRLKKLEDQKASLERYITEFEGFTDQYPEEVVVAGILSISYGNVMEMLYAGMNDDFKKFYPQYLLYPNVFQDAYQDGIIWANMGGVEGSLDDGLTKFKANFAPTIEEFIGEFNLPVSPLYHIANTMYKIRKQLKNKH

SEQ ID NO: 74584 - protein, 270 aa, Streptococcus pyogenes
MPSSFDLLGEMIGLLQTEQLTSSWACPLPNALTKRQDLWRALINQRPALPLSKDYLNLEDAYLDDWRASFVPVSVKDCQKTNYTSLFLYHGDIRYLAVDAIVNAANSELLGCFSPNHGCIDNAIHTFAGSRLRLACQAIMTEQGRKEAIGQAKLTSAYHLPASYIIHTVGPRITKGHHVSPIRADLLARCYRSSLDLAVKAGLTSLAFCSISTGEFGFPKKEAAQIAIKTVLKWQAEHPESKTLTTIFNTFTSEDKALYDTYLQKENNCE

SEQ ID NO: 74585 - protein, 110 aa, Streptococcus pyogenes
MKKIANYLLIEKTDDRYTISMTPELQDDIGTIGYAEFTDNDHLAVDDIILNLEASKTVMSVLSPLAGAVVERNEAATLTPTLLNSEKAEENWIVVLTDVDQAAFDALEDA

SEQ ID NO: 74586 - protein, 332 aa, Streptococcus pyogenes
MKVSILDYGVIDKEKTPQEALLETRCLAQVADKLGFHRFWVAEHHNIYAFAISSPELLMMHLADHTKQIRIGSGGIMPLHYSSFKIAEWIMTLEALHPNRIDLGIGNSLGTTLVQRALSSIHCKDSYSQVVTELYQYLNPDHLSPLPIFVNPRGNTYPQIWTLSNSLETAELAGQLGLGYTFGIFPYIPKDPITEAKRVSAHYRKAFRPSKLLKIPKLILAVFIVLSDTDEKAEALAKPLDIWMLGQQDFNEFKTYPDVEEARNYHLTEKQREAIAANRSRMVIGSPHTVKKQLDRLIEACQADELLAIPLVPEFANRQRTLELLADLYVTI

SEQ ID NO: 74587 - protein, 399 aa, Streptococcus pyogenes
MKERFSPLFEPLTLPNGSQLDNRFVLSPMVTNSSTKDGYVTQDDVSYALRRAASAPLQITGAAYVDPYGQLFEYGFSVTKDADISGLKELAQAMKAKGAKAVLQLTHAGRFASHALTKYGFVYGPSYMQLRSPQPHEVKPLTGQQIEELIAAYAQATRRAIQAGFDGVEVSSAQRLLIQTFFSTFSNKRTDSYGCQTLFNRSKLTLAVLQAVQQVIKQEAPDGFIFGFRATPEETRGNDIGYSIDEFLQLMDWVLNVAKLDYLAIASWGRHVFRNTVRSPGPYYGRRVNQVVRDYLRNKLPVMATGGMNTPDKAIEALAHADFIGVSTPFVVDPEFAHKIKEGCEESIHLRIRPADLKSLAIPQASFKDIVPLMDYGESLPKESRTLFRSLTHNYKEIK

SEQ ID NO: 74588 - protein, 283 aa, Streptococcus pyogenes
MKGRIVITIRDLASLPIFVYGDGNKKVPGALSPFVWTEVFLKTINQEPNQLILHIWPMTRTVILGMLDRQLPYFELAKTEIGNNGYVPVTRNIGGLAVVADDGILNFSLVIPDHFSESISISNAYLIMVDVIRESFSDYYQRIEYHEIKNSYCPGNFDLSIAGRKFAGIAQRRIKKGIVVSIYLSVCGDQAARGQLIKDFYEAGTQGEVTKVNYPQIDPECMATLSELLETPFTVAEVLERLRLTLRQLGFSLTEKSPDQALLTNFDAVYERMQLEVVRKEGK

SEQ ID NO: 74589 - protein, 572 aa, Streptococcus pyogenes
MTYTENFQKWLDFEQLPDYLRQELLSMDEKTKEDAFYTNLEFGTAGMRGYIGAGTNRINIYVVRQATEGLAKLIETKGEEAKKRGVAIAYDSRHFSPEFAFESAQVLAQHGIKSYVFEALRPTPELSFAVRHLNAYAGIMVTASHNPAPFNGYKVYGQDGGQLPPADADALTDFIRAIENPFAVELADLDENKSSGLIQVIGEDVDMEYLREVKDVNINQDLINNFGKDMKIVYTPLHGTGEMLTRRALAQAGFESVVVVESQAKADPDFSTVKSPNPESQAAFALAEELGREVEADVLVATDPDADRLGVEIRQPDGSYKNLSGNQIGAIIAKYILEAHKTAGTLPENAALAKSIVSTELVTKIAESYGATMFNVLTGFKFIAEKIQEFEEKHNHTYMFGFEESFGYLIKPFVRDKDAIQAVLLVAEIAAYYRSRGLTLADGIDEIYKEYGYFAEKTISVTLSGVDGAAEIKKIMDKFRENGPKQFNNTDIVLLEDFQKQTATKNDGTISNLTTPPSNVLKYTLADDSWIAVRPSGTEPKIKFYIATIGDTLDIAQEKIANIETEINTFVG

SEQ ID NO: 74590 - protein, 354 aa, Streptococcus pyogenes
MSKNAQKIAVPLISVLLGFLLGAIIMVIFGYDPIWGYEGLFQIAFGSVKNIGEIFRSMGPLILIALGFTVASRAGFFNVGLSGQALAGWISAGWFALLNPDMPRPLLILMTALIGMIAGGIAGAIPGILRAYLGTSEVIVTIMMNYIILYVGNAIVQRGYPESVKQSIDSTIQVSDNASYQTHWLSALTNNSRINIGIFFAIIAIALIWFLLNKTTLGFEIRSVGLNPHASEYAGMSSKRTIILSMIISGALAGLGGVVEGLGTFENVFVQGSSLAVGFDGMAVSLLAANSPLGIFFSSFLFGVLNIGAPGMNIAGIPPELVKVVTASIIFFVGSHYLIERYIIRPKKLVKGGK

SEQ ID NO: 74591 - protein, 197 aa, Streptococcus pyogenes
MTKMYYDENPDSLHDIHEVKVELLNHPFTFLTDSGVFSKKMVDFGSQVLLKTLNFKENERVLDLGCGYGPLGISLAKVQRVDATLVDINNRALDLARKNATNNQVAVTIFQSNIYENISGHFEHIISNPPIRAGKRVVHSIIEKSIDFLVVNGDLTIVIQKKQGAPSAKAKMATIFGNVEILRKDKGYYVLRSIKQA

SEQ ID NO: 74592 - protein, 306 aa, Streptococcus pyogenes
MSNEFINFEKISRESWKTLHQKAKALLTQEELKSITSLNDNISINDVIDIYLPLINLIQVYKIAQENLSFSKSLFLKKDIQLRPFIIGISGSVAVGKSTTSRLLQLLLSRTHPNSQVELVTTDGFLYPNQFLIEQGLLNRKGFPESYNMELLLDFLDSIKNGQTAFAPVYSHDIYDIIPNQKQSFNNPDFLIVEGINVFQNQQNNRLYMSDYFDFSIYIDADSSHIETWYIERFLSILKLAKRDPHNYYAQYAQLPRSEAIAFARNVWKTVNLENLEKFIEPTRNRAELILHKSADHKIDEIYLKK

SEQ ID NO: 74593 - protein, 77 aa, Streptococcus pyogenes
MANIKSAIKRAELNVKANEKNSAQKSAMRTAIKAFEANPSEELFRAASSSIDKAESKGLIHKNKASRDKARLAAKLG

SEQ ID NO: 74594 - protein, 845 aa, Streptococcus pyogenes
MKTVEHLIETFVPENYNIFLDINRQTKTFTGNVAINGEALDNHVAFHQKDLDIKSILLDNEAVIYQVDNDNEVVRVELPETGMMTLVIEFSGSITDNMTGIYPSYYTKNGEKKEVISTQFESHFAREAFPCIDEPQAKATFDLSLTFDQEIGEIALSNMPEVNIDRREETGLWTFDTTLRMSSYLLAFALGELHGKTVESKKGTTVGVYATTAHPLSSLDFSLDIAVRVINFYEDYFGVHYPIPQSLNIALPDFSSGAMENWGLITYREIYLLVDENSTVQSRQQVALVIAHEIAHQWFGNLVTMKWWDDLWLNESFANMMEYVSIEAIEPSWKIIEDFQTGGIPLALKRDATDGVQSVHVEVNHPDEINTLFDPAIVYAKGSRLMHMLRRFIGDRDFAIGLHHYFEKYQYRNTVGRDLWNILSDTSGKDVAAFMDAWLEQPGYPVLTARLENDQLILSQKQFFIGKGEEKGRLWPIPLNTNWHGLPETLTEAEMVIPNFSQLAAENEGALRFNIDNTAHYITDYQGSLLDALVTELAQLDNTSALQVIQERRLLADSGLISYAELVDLIAQLDDSKSYMVAEAVQQVVSGLKRFIDEGSLAEKSFNRLVTTIYQEDFNQHGFEKKADESDEDEMVRQVALGRLWLAENQTIIDGLRTIFEAYQNNIASIPAAVRRLVLANQMKYFETDSLVDIYFETYVATTDNNLRSDLTVAFSQTKQPTTIRRILVSLKDKDIIKPQDLSYWYNALLGQSFTQDIIWEWARENWDWIKSALGGDMSFDKFVIYPASNFKTPKHLAEYKSFFEPKLDDMAISRNITMGINEIEARVALITKEKEAVIAALSHY

SEQ ID NO: 74595 - protein, 253 aa, Streptococcus pyogenes
MMTEPILQIRDLSVYYNQKKTLKDVSLDLYPNEITALIGPSGSGKSTLLRSINRMNDLNPEVTITGSIVYNGHNIYSPRTDTVDLRKEIGMVFQQPNPFPMSIYENVVYGLRLKGIRDKSILDHAVESSLKGASIWNEVKDRLHDSAVGLSGGQQQRVCIARVLATSPRIILLDEPTSALDPISAGKIEETLLLLKKDYTLAIVTRSMQQASRLSDRTGFFLEGDLLECGPTKAMFMNPKRKETEDYISGKFG

SEQ ID NO: 74596 - protein, 311 aa, Streptococcus pyogenes
MENQELAKKLASPSKNSRLETFGRTITFLCLALIVFIVAMILIFVAQKGLSTFFVDKVNLFDFLFGKEWQPSVKNAAGIPYLGALPMITGSFLVTILSAIIATPFAIGAAVFMTEISPKYGAKLLQPAVELLVGIPSVVYGFIGLQVIVPFMRSIFGGTGFGILSGVCVLFVMILPTVTFMTTDSLRAVPRHYREASMAMGATRWQTIWRVVLNAARPGIFTAVIFGMARAFGEALAIQMVVGNSAVMPSSLTTPAATLTSVLTMGIGNTVMGTVQNNVLWSLALVLLLMSLAFNSLVKLITKERKRNYER

SEQ ID NO: 74597 - protein, 310 aa, Streptococcus pyogenes
MEIEYIKDYRDINQEDDTVLILGYFDGLHRGHKALFDKAREVANKEGLKVVVFTFTESPKLAFSRFSPELLLHITYPKKRYEKFADYGVNKLYLVDFTSKFSKVSSDHFITHYIKNLKAKHIVVGFDYKFGHNRTDSDYLTRNFEGQVYTIEEIKEDHRKISATWIRKLIQEGNVVKANHLLGYDLSTRGRVVHGDARGRTIGFPTANLAPIDNTYLPADGVYVTNVIVANKIYRSMTSLGKNVTFGGKELRLEVNIFDFDEEIYGEIIEIVWLDKIRDMEKFEGIEDLTDRLEYDKRTALNWKKDSKLS

SEQ ID NO: 74598 - protein, 294 aa, Streptococcus pyogenes
MINGIINLKKEAGMTSHDAVFKLRKLLQEKKIGHGGTLDPDVVGVLPIAVGKATRVIEYMTEAGKVYEGQVTLGYSTTTEDASGEVVARSSLPAVLTEELVDQTMTTFLGKITQTPPMYSAVKVNGRKLYEYARAGESVERPRREVTISLFERTSPLNFTEDGLCRFSFKVACSKGTYVRTLAVDLGRALGVESHMSFLQRSASAGLTLETAYTLGEIADMVSKQEMSFLLPIEYGVADLPKMVIDDTELTEISFGRRLSLPSQEPLLAAFHGEKVIAILEKRDQEYKPKKVLI

SEQ ID NO: 74599 - protein, 318 aa, Streptococcus pyogenes
MGSVERTLKMTLATIVAILIAYQLHLDYAMSAGIIALLSVLDTRKSSLVVARNRLLSFFLAFGIAMMCFSLFGFTTVGFMCYLLIIIPLLYHFQIEAGLVPITVLVTHLIAKKSIALPILSNEFMLFFVGTSVALLFNAYMGPQDQQIRYYHQKVESDLKGILYRFESFLLEGKGQNEGLLIKNLDKILDEALKLVYRERHNQLFQQTNYQVHYFEMRRQQNRLLGQMAINVNTLMRQSKESILLSHLFHETACQLSEQNPALTLIDDIEQLLETFRHGDLPQTREEFERRAVLFQLLQDLERFILLKVEFYQDYQND

SEQ ID NO: 74600 - protein, 66 aa, Streptococcus pyogenes
MSDEKYNAKLDQAGGKLKEGFGKISGDKSLETEGKVDKVTGKVKEVIADAKDTVKGLAKGLDNKDK

SEQ ID NO: 74601 - protein, 62 aa, Streptococcus pyogenes
MEFYEKFKYPIIGGLVGLIIAILLMAFGLFKTLLAIIFIILGIYGGLYAKKTGIIDQFLNRK

SEQ ID NO: 74602 - protein, 82 aa, Streptococcus pyogenes
MGLIWTLIVGALIGVIAGALTKKGGSMGWIANIAAGLVGSSVGQALLGSWGPSLAGMSLIPSVIGAVIVVMITSFVLNKTNN

SEQ ID NO: 74603 - protein, 772 aa, Streptococcus pyogenes
MNPLLNGMNDRQAQAVQTTEGPLLIMAGAGSGKTRVLTHRIAYLIDEKFVNPWNILAITFTNKAAREMKERALALNPATKDTLIATFHSMCVRILRREADHIGYNRNFTIVDPGEQRTLMKRILKQLNIDPKKWNERSILGTISNAKNDLLDEKGYEAQAADMYSQIVARCYKAYQEELRRSEALDFDDLIMMTLRLFDANPDVLAYYQQRYQYIHVDEYQDTNHAQYQLIKLLASRFKNICVVGDADQSIYGWRGADMQNILDFEKDYPDAKVVLLEENYRSTKKILQAANDVINNNRNRRPKKLWTQNADGEQLVYYRANDERDEAVFVASTISNMSQELGKNFKDFAVLYRTNAQSRTIEEALLKSNIPYTMVGGTKFYSRKEIRDLIAYLTIVANPADNISFERIVNEPKRGVGPGTLDKLRQFAYESDQSLLEAASNLLMSPLKGKAAQAIMDLANILGQLRQDLDQMSITDLAEALLEKTGYLDSLRLQNTLESQARIENIEEFLSVTKNFDESSASQEEDETGVDRLGRFLNDLALIADTDDSQAEAAEVTLMTLHAAKGLEFPVVFLIGMEEGVFPLSRASEDPDELEEERRLAYVGITRAEEVLFMTNANTRTLFGKSSYNRPTRFLKEISEELLSYKGLARPAQSSFGVRFSTETHTQFGQGMSLSEALQARKAQAQVRQSAQPMQAHTIPSASTSSVLPFGSNSSVEEVTWQIGDIAHHKKWGDGTVLEVSGSGKTMELKIKFPEVGLKKLLASVAPIEKK

SEQ ID NO: 74604 - protein, 604 aa, Streptococcus pyogenes
MCGIVGVVGNRNATDILMQGLEKLEYRGYDSAGIFVANANQTNLIKSVGRIADLRAKIGIDVAGSTGIGHTRWATHGQSTEDNAHPHTSQTGRFVLVHNGVIENYLHIKTEFLAGHDFKGQTDTEIAVHLIGKFVEEDKLSVLEAFKKSLSIIEGSYAFALMDSQATDTIYVAKNKSPLLIGLGEGYNMVCSDAMAMIRETSEFMEIHDKELVILTKDKVTVTDYDGKELIRDSYTAELDLSDIGKGTYPFYMLKEIDEQPTVMRQLISTYADETGNVQVDPAIITSIQEADRLYILAAGTSYHAGFATKNMLEQLTDTPVELGVASEWGYHMPLLSKKPMFILLSQSGETADSRQVLVKANAMGIPSLTVTNVPGSTLSREATYTMLIHAGPEIAVASTKAYTAQIAALAFLAKAVGEANGKQEALDFNLVHELSLVAQSIEATLSEKDLVAEKVQALLATTRNAFYIGRGNDYYVAMEAALKLKEISYIQCEGFAAGELKHGTISLIEEDTPVIALISSSQLVASHTRGNIQEVAARGAHVLTVVEEGLDREGDDIIVNKVHPFLAPIAMVIPTQLIAYYASLQRGLDVDKPRNLAKAVTVE

SEQ ID NO: 74605 - protein, 500 aa, Streptococcus pyogenes
MNKRVKIVATLGPAVEIRGGKKYGEDGYWAGQLDVEESAKKIAELIEAGANVFRFNFSHGDHKEQGDRMATVRLAEEIARQKVGFLLDTKGPEMRTELFADDAKEFSYVTGEKIRVATTQGIQSTRDVIALNVAGSLDIYDEVEVGHTILIDDGKLGLKVIDKDIATRQFIVEVENDGIIAKQKGVNIPNTKIPFPALAERDNADIRFGLEQGLNFIAISFVRTAKDVEEVREICRETGNDHVQLFAKIENQQGIDNLDEIIEAADGIMIARGDMGIEVPFEMVPVFQKMIITKVNAAGKAVITATNMLETMTEKPRATRSEVSDVFNAVIDGTDATMLSGESANGKYPVESVRTMATIDRNAQTLLNEYGRLDSSAFPRTNKTDVIASAVKDATHSMDIKLVVTITETGNTARAISKFRPDADILAVTFDEKVQRALMINWGVIPVLAEKPASTDDMFEVAERVAVEAGLVQSGDNIVIVAGVPVGTGGTNTMRVRTVK

SEQ ID NO: 74606 - protein, 337 aa, Streptococcus pyogenes
MKRIAVLTSGGDAPGMNAAIRAVVRKAISEGMEVYGINRGYAGMVDGDIFPLGSKEVGDKISRGGTFLYSARYPEFAQLEGQLAGIEQLKKHGIEGVVVIGGDGSYHGAMRLTEHGFPAVGIPGTIDNDIAGTDYTIGFDTAVNTAVEAIDKLRDTSSSHGRTFVVEVMGRNAGDIALWAGIASGADQIIVPEEEFDIEKVASTIQYDFEHKGKNHHIIVLAEGVMSGEAFAQKLKEAGDKSDLRVTNLGHILRGGSPTARDRVIASWMGSHAVELLKDGKGGLAVGIHNEELVESPILGTAEEGALFSLTEEGKIIVNNPHKARLDFAALNRSLSQ

SEQ ID NO: 74607 - protein, 1036 aa, Streptococcus pyogenes
MFAQLDTKTVYSFMDSLIDLNHYFERAKQFGYHTIGIMDKDNLYGAYHFIKGCQKNGLQPVLGLEIEILYQERQVLLNLIAQNTQGYHQLLKISTAKMSGKLHMDYFCQHLEGIAVIIPSKGWSDTLVVPFDYYIGVDQYTDLSHMDSKRQLIPLRTVRYFAQDDMETLHMLHAIRDNLSLAETPVVESDQELADCQQLTAFYQTHCPQALQNLEDLVSGIYYDFDTNLKLPHFNRDKSAKQELQDLTEAGLKEKGLWKEPYQSRLLHELVIISDMGFDDYFLIVWDLLRFGRSKGYYMGMGRGSAAGSLVAYALNITGIDPVQHDLLFERFLNKERYSMPDIDIDLPDIYRSEFLRYVRNRYGSDHSAQIVTFSTFGPKQAIRDVFKRFGVPEYELTNLTKKIGFKDSLATVYEKSISFRQVINSRTEFQKAFAIAKRIEGNPRQTSIHAAGIVMSDDALTNHIPLKSGDDMMITQYDAHAVEANGLLKMDFLGLRNLTFVQKMQEKVAKDYGCQIDITAIDLEDPQTLALFAKGDTKGIFQFEQNGAINLLKRIKPQRFEEIVATTSLNRPGASDYTTNFIKRREGQEKIDLIDPVIAPILEPTYGIMLYQEQVMQIAQVYAGFTLGKADLLRRAMSKKNLQEMQKMEEDFIASAKHLGRAEETARGLFKRMEKFAGYGFNRSHAFAYSALAFQLAYFKAHYPAVFYDIMMNYSSSDYITDALESDFQVAQVTINSIPYTDKIEASKIYMGLKNIKGLPRDFAYWIIEQRPFNSVEDFLTRTPEKYQKKVFLEPLIKIGLFDCFEPNRKKILDNLDGLLVFVNELGSLFSDSSFSWVDTKDYSVTEKYSLEQEIVGVGMSKHPLIDIAEKSTQTFTPISQLVKESEAVVLIQIDSIRIIRTKTSGQQMAFLSVNDTKKKLDVTLFPQEYAIYKDQLKEGEFYYLKGRIKERDHRLQMVCQQVQMAISQKYWLLVENHQFDSQISEILGAFPGTTPVVIHYQKNKETIALTKIQVHVTENLKEKLRPFVLKTVFR

SEQ ID NO: 74608 - protein, 232 aa, Streptococcus pyogenes
MAHLLQLHHVSKSYREKKAIDDLTITIPNGKIIGLLGPNGSGKTTLIKLINGLLQPNKGEIVIDGYRPCVETKKIISYLPDTTYLNENMRIKDMLEFFSDFYSDFDKSKATSLLRDLELDPEDRFKTLSKGNKEKVQLILVMSRKARLYVLDEPIGGVDPAARDYILKTIINSYCENASVIISTHLISDIEPILDEVIFLKQGRLFLSGNADDLRQEYQQSIDSLFRETYKV

SEQ ID NO: 74609 - protein, 339 aa, Streptococcus pyogenes
MVTIKDVAQKAGVNPSTVSRVLKDNRSISMKTKEKVRKAMADLGYVPNVAAQILASGLTHNIGLVFPPITTSDRLSEPFFMEILSTITNEAKESHFTVSIATGISLDDLIEQVKLMHLQKRVDGFIILYSDQDDPVKKYLMTNNLPFVIVGAPQGDTNKTTYIDNDNQLMAKTAVEHLYQKGHHNILFITDDLLSEVTSERYLGYLKGCFKRSLKTKPMLLFDRKDPVSVEILMETISSFKATALVVVGDVLAIRMVQLLSFYDIKVPDDMSIITFNNSNYAKLIHPYLTTFDINVENLGKMSFKQLLDIINSNEQNLSQTIFVPFSLKQRESVRDISH

SEQ ID NO: 74610 - protein, 567 aa, Streptococcus pyogenes
MNVAGMLHIPDSRYCFAISQKELVIRLRVAKEDRGITVNLVHGPKYGYHEFQEELEMSVAYTDHTHAYYETTLTLDDVRLAYIFKIEEEGQTYYFSEDGLTTSYDFSNGFYNFFQMPYINAVDVHQVIPWTKDAVFYQIFVDRFNRGDWEKGDSYVNMGWLEKPTPKSFAGGDLKGITEKLDYLKDLGITVIYLTPIFQSISNHKYDISDYYAIDPQFGTKYDLQELIDLAHKMGIKIILDAVFNHASSDAVEFQDVLRYGKESKFFDWFMTHDEHPSMDLVNYETFAGCNYMPKWNTSNRDVQDYLIEIGRYWIKEFCIDGWRLDVSDEVSHDFWRRFRQAVKAEKADAILIGENWHDAYPYLAGDQYDGIMNYAFTKACLDYFAFETMTSKQLAEKLSNILMRNTWQVNRMNLNLLDSHDTHRFFTQVKGSKDKLLAALALLFIFMGIPCLYYGTEVAMEGGYDPDSRRGFPWDDAERDKDFFSKVKAIIALRQQPALQEGAISIDYDEDCLILKRSLGEQSISLVLNNGESAYSIKEGGQILTSNGVTKNKKQLLQDGYIVFSN

SEQ ID NO: 74611 - protein, 419 aa, Streptococcus pyogenes
MSWNWKKTSVLGTLSLASVLPLTACVSGGGKGVKETDGKTIVVSVDEGYVDYIKSIKGEFEKEHKVTVKVKKEGMMDTLDKLSTDGPTGASPDVFLAPFDRVGGLGTEGQIAEVTLGNSKEFDDTVKKLVTIDGKTYGAPDVIETLVTYYNKDLVPQAPKSFTELEVLQKDSKFAFASEPGKSVGFLAKWTDFYYGYGLIAGYGGYIFGDKGTKPSDLGLGNDGTVEGLNYAKQWYGTWPQGMQDTKKAGDFITEQFISKKAGVIIDGPWAASSFKDAGVNFGVMEIPTLTNGKKYQPFAGGKAWVISNYSKGKTTAQKFLDYVTNAENQKRFYDKTQEIPANLTARNYASKEGNELTKAVISQFESAQPMPNIPEMAEVWEPGANMFFNVASGKEEASKAAKEAAKTIKEAIEQKYAE

SEQ ID NO: 74612 - protein, 512 aa, Streptococcus pyogenes
MIKDMIDSIEQFAQTQADFPVYDCLGERRTYGQLKRDSDSIAAFIDSLALLAKSPVLVFGAQTYDMLATFVALTKSGHAYIPVDVHSAPERILAIIEIAKPSLIIAIEEFPLTIEGISLVSLSEIESAKLAEMPYERTHSVKGDDNYYIIFTSGTTGQPKGVQISHDNLLSFTNWMIEDAAFDVPKQPQMLAQPPYSFDLSVMYWAPTLALGGTLFALPKELVADFKQLFTTIAQLPVGIWTSTPSFADMAMLSDDFCQAKMPALTHFYFDGEELTVSTARKLFERFPSAKIINAYGPTEATVALSAIEITREMVDNYTRLPIGYPKPDSPTYIIDEDGKELSSGEQGEIIVTGPAVSKGYLNNPEKTAEAFFTFKGQPAYHTGDIGSLTEDNILLYGGRLDFQIKYAGYRIELEDVSQQLNQSPMVASAVAVPRYNKEHKVQNLLAYIVVKDGVKERFDRELELTKAIKASVKDHMMSYMMPSKFLYRDSLPLTPNGKIDIKTLINEVNNR

SEQ ID NO: 74613 - protein, 364 aa, Streptococcus pyogenes
MVDLGFSLYPERYDVTKSKAYIDLCHSYGAKRLFMSLLQLAPADHQMFHCYAELIAYANQLGIRVIADVSPSFISQAGWSDQLIERAHAFGLAGLRLDEALPLAEIVTLTRNPFGLKIELNMSTDKQLLMSLLATDAERSNIIGCHNFYPHEFTGLSWQHFKDMSRFYHEHDIETAAFITAQSASEGPWLLAEGLPTVEDHRHLPIGLQVELMKAIGTIDNILISNQFISEEELAACTQALARPVTTIKVRPIIDLTEVEEQIIGYPHCYRGDVSDYVIRSTMPRLVYAQESIAPRDQSKEVKRGSIIIDNDRYHRYKGELQIALKNFTVSSKANVVAEVREDYLSLLDDLRPWQEFCLEIAPS

SEQ ID NO: 74614 - protein, 466 aa, Streptococcus pyogenes
MKQRKHRYQFPDGFLWGSSTSGPQSEGTVPGDGKGPSNWDYWFSIESAKFHHQIGPEKTSTFYENYKGDIALLKETGHTIFRTSIQWSRLIPEGVGEVNPKAVTFYREVFQDIIAQGIKLIVNLYHFDLPYALQEKGGWENKATVWAYETYAKTCFELFGDLVNTWITFNEPIVPVECGYLGYYHYPCKVDAKAAVQVAYNTQLASSLAVKACHKLHPDHKISIVLNMTPAYPRSNAPEDVKAARIAELFQTKSFLDPSVLGVYPAELVSILEEADLLPQYSADELEIIKNNTVDFLGVNYYQPLRVQAPSKSQQEGDLLILDIYFEPYDMPGKKVNPHRGWEIYEPGLYDIALNLKEHYGNIEWLVTENGMGVEGEEAFLADGQIQDDYRITFIEDHLIQLHKALGEGANCKGYLLWTFIDCWSWLNAYKNRYGLVALDLESQKRTIKKSGYWFKALSESNGFDK

SEQ ID NO: 74615 - protein, 437 aa, Streptococcus pyogenes
MSMFLDTAKISVQAGRGGDGMVAFRREKYVPNGGPWGGDGGKGGSVIFRVDEGLRTLMDFRYNRKFKAKSGEKGMTKGMHGRGAEDLIVFVPQGTTVRDAETGKVITDLVEHGQEVVIAKGGRGGRGNIRFATPRNPAPEIAENGEPGEERQLELELKILADVGLVGFPSVGKSTLLSVVSSAKPKIGAYHFTTIVPNLGMVRTKSGDSFAMADLPGLIEGASQGVGLGTQFLRHIERTRVILHVIDMSASEGRDPYEDYVSINNELETYNLRLMERPQIIVANKMDIPEAQENLKAFKKKLAAQYDEFDDLPMIFPISSLAHQGLENLLEATAELLAKTDEFLLYDESDLVDEEAYYGFAETEKDFEITRDDDATWVLSGEKLERLFVMTNMERDESIMKFARQLRGMGVDEALRERGAKDGDPVRIGKFEFEFVD

SEQ ID NO: 74616 - protein, 171 aa, Streptococcus pyogenes; identical to SEQ ID NO: 74357

SEQ ID NO: 74617 - protein, 268 aa, Streptococcus pyogenes
MLLEILDLSRSTYYYQVKRLAQGDKDIELKHVIREIYDEHKGNYGYRRIHMELRNRGFVVNHKKVQRLMKVMGLAARIRRKRKYSSYKGEVGKKADNLIKRHFEGSKPYEKCYTDVTEFALPEGKLYLSPVFDSYNCEIIDFTLSRSPNLKQAQTMLEKTFPADSYSGTILHSDQGWQYQHQSYHDFLESKGILPSMSRKGNSPDNGMMDSFFGILKSEMFYGLETTYQSLDKLEEAITDYIFYYNNKRIKAKLKGLSPVQYRTKSFQ

SEQ ID NO: 74618 - protein, 244 aa, Streptococcus pyogenes
MMRLDKFLVATGVGTRSQVKLLLKKKAIFVNQKVETSAKAHIDEYKDLVTYQGTPLVYESFVYYLLNKPSGYVSATQDRQQATVMELLDDTARQKAVFPVGRLDKDTRGLLLLTNNGQLAHDLLSPKKHVTKEYLAKVAGIMTEADKDYFARGISLKDHQCLPAHLEVLASDLQQQTSLVKITIQEGKFHQVKRMVAACGKEVLDLQRLSMGPLKLDPSLAEGEFRRLTPEELQSLAPYCQSSL

SEQ ID NO: 74619 - protein, 121 aa, Streptococcus pyogenes
MTIYSHTYETRPNHSAKAMGSGTLNVLATPALVAFMENASYLFAQEQLDSDFTTVGSEIAIQHLAASAIGDPVTIIITALKEEGRKYDFRLEAFVGEQLIGKACHTRVRVNSKHFMAKVAE

SEQ ID NO: 74620 - protein, 406 aa, Streptococcus pyogenes
MSTLSLDTTNKRALVAAIAASGTDDLNVMFLAFSMSSIMTDLGLSGTQGGWIATITNLGMLVGGLLFGLLADRHHKFKVFKWTILLFSVATGLIYFTQSLPYLYLMRFIAGIGVGGEYGVAIAIMAGIVPPEKMGRMSSLNGIAGQLGSISSALLAGWLAPSLGWRGLFLFGLLPILLVIWMTLAIDDQKIWDHYGQEEEECSQPIKINELFKTKSLTAQTLALMVMTTVQIAGYFGMMNWLPTIIQTSLNLSVKSSSLWMVATIVGMCLGMLYFGQLLDCFGPRLIYSLFLLASSICVYLFQFANSMASMVIGGAIVGFFVNGMFAGYGAMITRLYPHHIRSTANNVILNVGRALGGFSSVAIGSILDASGISMVMIFLASLYVISFGAMWSIGQLKAERYQQLR

SEQ ID NO: 74621 - protein, 483 aa, Streptococcus pyogenes
MTKYPMGGLSHHEELRYFYLLRNLSYLSENEKKEFAFLKSKLEIGRAYAPSKQHYRKSKRQEPYFEDDYYNDYSPNDLLEDDDVNHDSSFVPYGLPIYPKEDRYLNKKTKLTARRPIDAPQPIDEDDAFLTESVARCALPRSQKRKHKKKGCMKWFFNILGLLLMTVLMGLGLMFAKGVFDISTNKANYKPAVSQAFDGQETQDGTNILILGSDQRVTQGSTDARTDTIMVVNVGNHAKKIKMVSFMRDTLINIPGYSYNDNSYDLKLNSAFNLGEQEDHHGAEYVRRALKHNFDIDIKYYVMVDFETFAEAIDTLFPNGVKIDAKFATVGGVAVDSVEVPDDLRMKNGVVPNQTIEVGEQRMDGRTLLNYARFRKDDEGDFGRTVRQQQVMSAVMSQIKDPTKLFTGSAAIGKIYALTSTNVSFPFVVKNGVSVLGSGKNGVEHVTIPENGDWVDEYDMYGGQALYIDFDKYQKTLAKLGLR

SEQ ID NO: 74622 - protein, 419 aa, Streptococcus pyogenes
MRKIIINGGKALSGEVAVSGAKNSVVALIPAIILADDIVILDGVPAISDVDSLIEIMELMGATVNYHGDTLEIDPRGVQDIPMPYGKINSLRASYYFYGSLLGRFGQAVVGLPGGCDLGPRPIDLHLKAFEAMGVEVSYEGENMNLSTNGQKIHGAHIYMDTVSVGATINTMVAATKAQGKTVIENAAREPEIIDVATLLNNMGAHIRGAGTDIITIQGVQKLHGTRHQVIPDRIEAGTYIALAAAIGKGVKITNVLYEHLESFIAKLEEMGVRMTVEEDAIFVEKQESLKAITIKTSPYPGFATDLQQPLTPLLLKADGRGTIIDTIYEKRINHVPELMRMGADISVIGGQIVYQGPSRLTGAQVKATDLRAGAALVTAGLIAEGKTEITNIEFILRGYASIIAKLTALGADIQLIED

SEQ ID NO: 74623 - protein, 398 aa, Streptococcus pyogenes
MSERKLFTSESVSEGHPDKIADQISDAILDAILAEDPEAHVAAETCVYTGSVHVFGEISTTAYIDINRVVRDTIAEIGYTEAEYGFSAESVGVHPSLVEQSGDIAQGVNEAFESREGDTDDLSHIGAGDQGLMFGFAINETPELMPLPISLSHQLVRRLAELRKSGEISYLRPDAKSQVTVEYDEHDKPVRVDTVVISTQHDPEATNDQIRQDVIEKVIKAVIPADYLDDDTKFFINPTGRFVIGGPQGDSGLTGRKIIVDTYGGYSRHGGGAFSGKDATKVDRSASYAARYIAKNLVAAGLVTKAEVQLAYAIGVAQPVSVRVDTFGTSTVPEAVLEAAVRQVFDLRPAGIIQMLDLKRPIYKQTAAYGHMGRTDIDLPWERLNKVDALVEAVKTVL

SEQ ID NO: 74624 - protein, 556 aa, Streptococcus pyogenes
MYQALYRKYRSQTFDEMVGQSVISTTLKQAVESGKISHAYLFSGPRGTGKTSAAKIFAKAMNCPNQVDGEPCNQCDICRDITNGSLEDVIEIDAASNNGVDEIRDIRDKSTYAPSRATYKVYIIDEVHMLSTGAFNALLKTLEEPTENVVFILATTELHKIPATILSRVQRFEFKAIKQKAIREHLAWVLDKEGIAYEVDALNLIARRAEGGMRDALSILDQALSLSPDNQVAIAIAEEITGSISILALGDYVRYVSQEQATQALAALETIYDSGKSMSRFATDLLTYLRDLLVVKAGGDNQRQSAVFDTNLSLSIDRIFQMITVVTSHLPEIKKGTHPRIYAEMMTIQLAQKEQILSQVNLSGELISEIETLKNELAQLKQQLSQLQSRPDSLARSDKTKPKTTSYRVDRVTILKIMEETVRNSQQSRQYLDALKNAWNEILDNISAQDRALLMGSEPVLANSENAILAFEAAFNAEQVMSRNNLNDMFGNIMSKAAGFSPNILAVPRTDFQHIRKEFAQQMKSQKDSVQEEQEVALDIPEGFDFLLDKINTIDD

SEQ ID NO: 74625 - protein, 475 aa, Streptococcus pyogenes
MAKQYKNLVNGEWKLSENEITIYAPATGEELGSVPAMTQAEVDAVYASAKKALSDWRALSYVERAAYLHKAADILVRDAEKIGAILSKEVAKGHKAAVSEVIRTAEIINYAAEEGLRMEGEVLEGGSFEAASKKKIAIVRREPVGLVLAISPFNYPVNLAGSKIAPALIAGNVVALKPPTQGSISGLLLAEAFAEAGIPAGVFNTITGRGSVIGDYIVEHEAVSFINFTGSTPIGEGIGKLAGMRPIMLELGGKDSAIVLEDADLALAAKNIVAGAFGYSGQRCTAVKRVLVMDKVADQLAAEIKTLVEKLSVGMPEDDADITPLIDTSAADFVEGLIKDATDKGATALTAFNREGNLISPVLFDHVTTDMRLAWEEPFGPVLPIIRVTTVEEAIKISNESEYGLQASIFTTNFPKAFGIAEQLEVGTVHLNNKTQRGTDNFPFLGAKKSGAGVQGVKYSIEAMTTVKSVVFDIQ

SEQ ID NO: 74626 - protein, 577 aa, Streptococcus pyogenes
MTEMLKGIAASDGVAVAKAYLLVQPDLSFETVTVADTNAEEARLDVALQAAQDELSVIRENAVESLGEEAAAVFDAHLMVLADPEMISQVKETIRAKQTNAETGLKEVTDMFITIFEGMEDNPYMQERAADIRDVAKRVLAHLLGVKLPNPATINEESIVIAHDLTPSDTAQLNKQFVKAFVTNIGGRTSHSAIMARTLEIAAVLGTNDITKRVKDGDVIAVNGITGEVIIDPSEDQVLAFKEAGAAYAKQKAEWSLLKDAHTETADGKHFELAANIGTPKDVEGVNDNGAEAVGLYRTEFLYMDSQDFPTEDEQYEAYKAVLEGMNGKPVVVRTMDIGGDKELPYFDLPKEMNPFLGFRALRISISETGDAMFRTQMRALLRASVHGQLRIMFPMVALLKEFRAAKAVFDEEKANLLAEGVAVADDIQVGIMIEIPAAAMLADQFAKEVDFFSIGTNDLIQYTMAADRMNEQVSYLYQPYNPSILRLINNVIKAAHAEGKWAGMCGEMAGDQQAVPLLVGMGLDEFSMSATSVLRTRSLMKKLDSAKMEEYANRALTECSTAEEVLELSKEYVSED

SEQ ID NO: 74627 - protein, 87 aa, Streptococcus pyogenes
MASKDFHIVAETGIHARPATLLVQTASKFASDITLDYKGKAVNLKSIMGVMSLGVGQGADVTISAEGADAEDAIAAIEETMTKEGLA

SEQ ID NO: 74628 - protein, 319 aa, Streptococcus pyogenes
MTTYYEAINWNEIEDVIDKSTWEKLTEQFWLDTRIPLSNDLDDWRKLSLQEKDLVGKVFGGLTLLDTMQSETGVEAIRADVRTPHEEAVLNNIQFMESVHAKSYSSIFSTLNTKKEIEEIFEWTNNNEFLQEKARIINDIYANGDALQKKVASTYLETFLFYSGFFTPLYYLGNNKLANVAEIIKLIIRDESVHGTYIGYKFQLGFNELPEDEQENFRDWMYDLLYQLYENEEKYTKTLYDGVGWTEEVMTFLRYNANKALMNLGQDPLFPDTANDVNPIVMNGISTGTSNHDFFSQVGNGYLLGSVEAMSDDDYNYGL

SEQ ID NO: 74629 - protein, 872 aa, Streptococcus pyogenes
MKELSSAQIRQMWLDFWKSKGHCVEPSANLVPVNDPTLLWINSGVATLKKYFDGSVIPENPRITNAQKSIRTNDIENVGKTARHHTMFEMLGNFSIGDYFRDEAIEWGFELLTSPDWFDFPKDKLYMTYYPDDKDSYNRWIACGVEPSHLVPIEDNFWEIGAGPSGPDTEIFFDRGEDFDPENIGLRLLAEDIENDRYIEIWNIVLSQFNADPAVPRSEYKELPNKNIDTGAGLERLAAVMQGAKTNFETDLFMPIIREVEKLSGKTYDPDGDNMSFKVIADHIRALSFAIGDGALPGNEGRGYVLRRLLRRAVMHGRRLGINETFLYKLVPTVGQIMESYYPEVLEKRDFIEKIVKREEETFARTIDAGSGHLDSLLAQLKAEGKDTLEGKDIFKLYDTYGFPVELTEELAEDAGYKIDHEGFKSAMKEQQDRARAAVVKGGSMGMQNETLAGIVEESRFEYDTYSLESSLSVIIADNERTEAVSEGQALLVFAQTPFYAEMGGQVADTGRIKNDKGDTVAEVVDVQKAPNGQPLHTVNVLASLSVGTNYTLEINKERRLAVEKNHTATHLLHAALHNVIGEHATQAGSLNEEEFLRFDFTHFEAVSNEELRHIEQEVNEQIWNALTITTTETDVETAKEMGAMALFGEKYGKVVRVVQIGNYSVELCGGTHLNNSSEIGLFKIVKEEGIGSGTRRIIAVTGRQAFEAYRNQEDALKEIAATVKAPQLKDAAAKVQALSDSLRDLQKENAELKEKAAAAAAGDVFKDVQEAKGVRFIASQVDVADAGALRTFADNWKQKDYSDVLVLVAAIGEKVNVLVASKTKDVHAGNMIKELAPIVAGRGGGKPDMAMAGGSDASKIAELLAAVAEIV

SEQ ID NO: 74630 - protein, 234 aa, Streptococcus pyogenes
MKIIRVQDQIEGGKIAFTLLKDSLAKGAKTLGLATGSSPISFYQEMVKSPLDFSDLTSINLDEYVGLSVESDQSYDYFMRQNLFNAKPFKKNYLPNGLATDVEAEAKRYNQIIAEHPIDFQVLGIGRNGHIGFNEPGTSFEEETHVVDLQESTIEANSRFFTSIEDVPKQAISMGIASIMKSEMIVLLAFGQEKADAIKGMVFGPITEHLPASILQKHDHVIVIVDEAAASQLD

SEQ ID NO: 74631 - protein, 342 aa, Streptococcus pyogenes
MNTNNFDFELPEELIAQTPLEKRDSSKLLIIDHRQKTMVDSHFDHIIDQLNPGDALVMNNTRVLPARLYGEKPDTHGHVELLLLKNTQGDQWEVLAKPAKRLKVGSQVNFGDGRLKATIIDELEHGGRIVEFSYDGIFLEVLESLGEMPLPPYIHEKLEDAERYQTVYAKENGSAAAPTAGLHFTTDLLKKIEAKGVHLVYLTLHVGLGTFRPVSVDNLDEHDMHSEFYSLSEEAAQTLRDVKQAGGRVVAVGTTSIRTLETIGGKFQGDIQADSGWTNIFIKPGYQFKVVDAFSTNFHLPKSTLVMLVSAFAGRDFVLEAYRHAVDEKYRFFSFGDAMFVN

SEQ ID NO: 74632 - protein, 272 aa, Streptococcus pyogenes
MKSDFDFRKVSFRDTISKIILLKEKPVFYAYLRGLVVFLLWVVNGNAHYHHEEKMLDASENYILVAPHRTFWDPVYMAFAARPKQFIFMAKKELFANRLFAWWIKMCGAFPIDRDKPSPDAIRYPVNMLKKSNRSLLMFPSGSRHSQEVKGGVAVIAKLAKVKIMPAAYQGPMSVKGLLAGERVDMTFGNPIDVSDIKRMNDEGIAEVANRIQAEFDRIDDELAPFQPGKARNPLTYLYRLPLGLVLVVVLLLTMLFSYIASFVWNPDKHRH

SEQ ID NO: 74633 - protein, 666 aa, Streptococcus pyogenes
MSDSHLTAFDKASKAGFIIALGIVYGDIGTSPLYTIQSLVENQGGVNQVSESFILGSISLIIWTLTLITTIKYVLIALKADNHHEGGIFSLFTLVRKMSPWLIIPAMIGGATLLSDGALTPAVTVTSAIEGLKAVPGLSHIYQNQTNVIITTLVILIVLFGIQRFGTGFIGKIFGPVMFIWFSFLGVSGFFNTLGHLEIFKAINPYYALHLLFSPENHRGIFILGSIFLATTGAEALYSDLGHVGRGNIYVSWPFVKMCIVLSYCGQAAWILANKHSGIELNPFFASVPSQLRVYLVSLATLAAIIASQALISGSFTLVSEAMRLKIFPLFRVTYPGANLGQLYIPVINWILFAVTSCTVLAFRTSAHMEAAYGLAITITMLMTTILLKYYLIKKGTRPILAHLVMAFFALVEFIFFLASAIKFMHGGYAVVILALAIVFVMFIWHAGTRIVFKYVKSLNLNDYKEQIKQLRDDVCFDLYQTNVVYLSNRMQDHMIDRSILYSILDKRPKRAQVYWFVNVQVTDEPYTAKYKVDMMGTDYMVRVNLYLGFRMPQTVPRYLRTIVQDLMESGRLPKQEQEYTITPGRDVGDFRFVLIEERVSNARQLSNFERFIMQTKASIKHVTASPMRWFGLQYSEVTLEVVPLILSDVLKLPIKELVPVEDSEA

SEQ ID NO: 74634 - protein, 539 aa, Streptococcus pyogenes
MKFTEFNLSQDIQSAVVTAGFEKASPIQEMTIPLALEGKDVIGQAQTGTGKTAAFGLPTLNKIRTNENIIQALVIAPTRELAVQSQEELFRFGREKGVKVRSVYGGSSIEKQIKALKSGAHIVVGTPGRLLDLIKRKALILDHVETLILDEADEMLNMGFLEDIEAIISRVPADRQTLLFSATMPAPIKQIGVKFMKDPEHVQIKNKELTNVNVDQYYVRVKEQEKFDTMTRLMDVNQPELSIVFGRTKRRVDEITRGLKLRGFRAEGIHGDLDQNKRLRVIRDFKNDQIDILVATDVAARGLDISGVTHVYNYDITQDPESYVHRIGRTGRAGKSGESITFVSPNEMGYLSMIENLTKKQMKPLRPATAEEAFQAKKKVALKKIERDFADETIRSNFDKFKGDAVQLAAEFTPEELALYILSLTVQDPDSLPEVEIAREKPLPFKYVGGGHGNKNGKGGRGRDNRNRGDRRGGYRGDRNRDERDGDRRRQKRDKRDGHDGSGNRDFKRKSKRNSKDFFNKEKKSSAKNTGFVIRHKGE

SEQ ID NO: 74635 - protein, 514 aa, Streptococcus pyogenes
MSLTEEIKKRRTFAIISHPDAGKTTITEQLLYFGGEIREAGTVKGKKSGTFAKSDWMDIEKQRGISVTSSVMQFDYAGKRVNILDTPGHEDFSEDTYRTLMAVDAAVMVVDSAKGIEAQTKKLFEVVKHRNIPVFTFINKLDRDGREPLELLEELEEVLGIASYPMNWPIGMGRAFEGLYDLHNKRLELYKGDERFASIEDGDQLFANNPFYEQVKEDIELLQEAGNDFSEQAILDGDLTPVFFGSALTNFGVQTFLDTFLEFAPEPHGHKTTEGNVVDPLAKDFSGFVFKIQANMDPKHRDRIAFVRIVSGEFERGMGVNLTRTGKGAKLSNVTQFMAESRENVTNAVAGDIIGVYDTGTYQVGDTLTVGKNKFEFEPLPTFTPEIFMKVSPKNVMKQKSFHKGIEQLVQEGAIQLYKNYQTGEYMLGAVGQLQFEVFKHRMEGEYNAEVVMTPMGKKTVRWISEDDLDQRMSSSRNILAKDRFDQPVFLFENDFALRWFADKYPDVTLEEKM

SEQ ID NO: 74636 - protein, 463 aa, Streptococcus pyogenes
MKLTLHEVAKIVDAQNNVSDLDDVPLHHIEFDSRKITKGDLFLPLKGQRDGHEFIDLAFQNGAVATFSEKELPGKPHLLVEDCLKAFQKLAHYYIDKMRVDVIAVTGSNGKTSTKDMIGAVLSTTYKTYKTQGNYNNEIGLPYTVLHMPDDTEKIVLEMGQDHMGDIRLLSEIARPRIAVLTLVGEAHLEYFGSRDKIAQGKMQIVDGMNSDGILIAPGDPIIDPYLPENQMVIRFGNQQEIDVTGIQEDKDSLTFTTNVLATPVSLPLPGKYNATNAMVAAYVGKLLAVTDEDIIAALQTVTLTGNRTEWKKAANGADILSDVYNANPTAMRLILETFANIAKNPGGKKIAVLADMKELGKDSVILHSQLIDSLTSGNIDQLVFYGDHIKELARLASQVYPAEQVHYFLKTEQEDQFEAMAQYVQNILNPFDQILLKGSHSMSLEKLVDRLVTDKNCDSYQP

SEQ ID NO: 74637 - protein, 348 aa, Streptococcus pyogenes
MSKQTLVLLYGGRSAEREVSVLSAESVMRAVNYDKFLVKTYFITQMGQFIKTQQFSEKPSESERLMTNETIELTQKIKPSDIYEEGAVVFPVLHGPMGEDGSIQGFLEVLRMPYIGTNVMSSSIAMDKITTKRVLESIGIPQVAYTVYIDGQDLEACLVETLARLTFPIFVKPANMGSSVGISKAQTKVELRKAIQLALTYDSRVLIEQGVVAREIEVGLLGNDKVKSTLPGEVIKDVDFYDYQAKYVDNKITMAIPADVDQSIVTEMRSYAEVAFKALGGCGLSRCDFFLTQDGQVYLNELNTMPGFTQWSMYPLLWENMGLAYPDLIEELVTLAQEMFDQRESHLI

SEQ ID NO: 74638 - protein, 198 aa, Streptococcus pyogenes
MLYPTPIAKLIDSYSKLPGIGIKTATRLAFYTIGMSNEDVNDFAKNLLAAKRELTYCSICGNLTDDDPCHICTDTSRDQTTILVVEDAKDVSAMEKIQEYHGYYHVLHGLISPMNGVGPDDINLKSLITRLMDGKVSEVIVATNATADGEATSMYISRVLKPAGIKVTRLARGLAVGSDIEYADEVTLLRAIENRTEL

SEQ ID NO: 74639 - protein, 594 aa, Streptococcus pyogenes
MSRDPTYTINEHDLSFADGRFYVTFKADKSSETVRLNSSCLGNTIIKKLQVEDDNTMHDFVKPKVTTQQAFGLAQQVKELDLQLKDPKSDLWGKIKFNNKAMLVEYANKEMSSAIAQSAEQILLQVKSIDDERYSKFEQTLNGIKQTVKSESVESARTQLASMFDSRISGLDGKYSRLSQTIDSLSSRLDDGVGNYSTLSQKVSGIDLRVSNAANDVSRLSQTAQGLQSQITNANQNYSSLSQTVQGLQTTVRDNQSNATSRINQLSDLISTKVSKGDVETTIAQSYDKIAFAIRDKLPASKMSGSEIISAINLDRSGVKITGKNITLDGNSYISNAVIKDAHIANMDAGKINTGYLNANRIATEAITGEKIKMDYAFFNKLTANEGYFRTLFAKDIFATSVQSVTLSASKITGGVLAATNGASQWDLNNANMTFNRDATINFNSKNNALVRKDGTHTAFVHFSNATPKGYRGSALYASIGITSSGDGIDSASSGRFAGLRSFRYATGYNHTAAVDQTELYGDNVLIADDFNINRGFKFRPDKMEKVLDMNDLYAAVVALGRCWGHLANVGWNTAHSNFTSAVSRELNNYITKI

SEQ ID NO: 74640 - protein, 91 aa, Streptococcus pyogenes
MANKQDLIAKVAEATELTKKDSAAAVDAVFSTIEAFLAEGEKVQLIGFGNFEVRERAARKGRNPQTGAEIEIAASKVPAFKAGKALKDAVK

SEQ ID NO: 74641 - protein, 286 aa, Streptococcus pyogenes
MRLWFVMNNRHLFSGIFFFVISLCLAFLLLNIIIPKSNSRLKKSDFLKKEQVAIQYVAIGDSLTEGVGDLTHQGGFVPLLTNDLSEYFKANVNHQNYGVSGDTSQQILDRMIKQKQIQLSLKKADIMTLTVGGNDVMAVIRKNLADLQVSSFRKPARQYQKRLRQIIELARKDNKDLPIFILGIYNPFYLNFPELTDMQKVIDDWNTKTKEVVGEYDRVYFVPINDLLYKGINGQEGIVHSSGDQTTIVNDALFTGDHFHPNNTGYQIMSNAVMEKIKKHEKKIKP

SEQ ID NO: 74642 - protein, 290 aa, Streptococcus pyogenes
MDKLARIDEAIRRYYKTTSNGVSEELIDAILYSVDSGGKRIRPLILLEMIEGFGVSLQNAHFDLAAALEMIHTGSLIHDDLPAMDNDDYRRGRLTNHKQFGEATAILAGDSLFLDPFGLIAQAELNSEVKVALIQELSLASGTFGMVGGQMLDMKGENQALSLPQLSLIHLNKTGKLLAFPFKAAALITEQAMTVRQQLEQAGMLIGHAFQIRDDILDVTASFEDLGKTPKKDLFAEKATYPSLLGLEASYQLLTESLDQALTIFQTLESDVGFKPQIITKLIEGLRLNA

SEQ ID NO: 74643 - protein, 446 aa, Streptococcus pyogenes
MADYLTVTHLTKYLKLKFDRDPYLERVYLTGQVSNFRKRPTHQYFSLKDESAVIQATMWAGVYKKLGFDLEEGMKINVIGRVQLYEPSGSYSIVIEKAEPDGIGALALQFEQLKKKLTAEGYFEQKHKQPLPQFVSKIGVITSPSGAVIRDIITTVSRRFPGVEILLFPTKVQGDGAAQEVVANIRRANQREDLDLLIVGRGGGSIEDLWAFNEEIVVQAIFESQLPVISSVGHETDTTLADFVADRRAATPTAAAELATPITKTDLMSWIVERQNRSYQACLRRIKQRQEWVDKLSQSVIFRQPERLYDAYLQKIDRLSMTLMNTMKDRLSSAKENKVQLDHALANSQLQTKIERYQDRVATAKRLLMANMASQYDSQLARFEKAQDALLSLDASRIIARGYAMIEKNQALVASVSQITKGDQLTIKMRDGQLDVEVKDVKNENI

SEQ ID NO: 74644 - protein, 760 aa, Streptococcus pyogenes
MLCQNCNLNESTIHLYTSVNGKQRQVDLCQNCYQIMKSDPANSILNGLTPGYRAQDRSTSPFFDDFFGDLNNFRAFGNLPNTPPTQAGQNGNGGGRYGGNYNGQRPAQPQTPNQQAKGLLEEFGINVTDIARNGNIDPVIGRDEEITRVIEILNRRTKNNPVLIGEPGVGKTAVVEGLAQKIIDGTVPQKLQGKQVIRLDVVSLVQGTGIRGQFEERMQKLMEEIRNRKDVILFIDEIHEIVGAGSAGDGNMDAGNILKPALARGELQLVGATTLNEYRIIEKDAALERRMQPVKVDEPSVEETITILKGIQPKYEDYHHVKYSPAAIEAAAHLSNRYIQDRFLPDKAIDLLDEAGSKMNLTLNFVDPKEIDKRLIEAENLKAQATRDEDYERAAYFRDQITKYKEMQAQKVDEQDIPIITEKTIEAIVEQKTNIPVGDLKEKEQSQLVNLANDLKAHVIGQDDAVDKIAKAIRRNRVGLGTPNRPIGSFLFVGPTGVGKTELSKQLAIELFGSTNNMIRFDMSEYMEKHAVAKLVGAPPGYIGYEEAGQLTEQVRRNPYSLILLDEVEKAHPDVMHMFLQVLDDGRLTDGQGRTVSFKDTIIIMTSNAGTGKSEASVGFGAAREGRTSSVLGELSNFFSPEFMNRFDGIIEFKALSKEHLLHIVDLMLEDVNERLGYNGIHLDVTQKVKEKLVDLGYDPKMGARPLRRTIQDYIEDAITDYYLEHPTEKQLRALMTNSENITIKAVKEGDSFLNEESLD

SEQ ID NO: 74645 - protein, 151 aa, Streptococcus pyogenes
MMIPTFGHKNAHKDYVTRYGVYAIIPNHEQTKIILVQAPNGSWFLPGGEIEAGEGQLQALERELIEELGFSATIGSYYGQADEYFYSRHRDTHFYHPAYLYEVTAFQAVSKPLEDFNNLGWFSPIEAIAKLKRESHQWGVKEWQKKHHSTN

SEQ ID NO: 74646 - protein, 933 aa, Streptococcus pyogenes
MKLKETLNLGKTAFPMRAGLPNKEPQWQAAWEQAELYKKRQELNAGKPAFHLHDGPPYANGNIHVGHALNKISKDIIVRSKSMSGFQAPYVPGWDTHGLPIEQVLAKQGIKRKEMDLAEYLEMCRQYALSQVDKQRDDFKRLGVSADWENPYVTLDPQFEADQIRVFGAMAEKGYIYRGAKPVYWSWSSESALAEAEIEYHDIDSTSLYYANKVKDGKGILDTNTYIVVWTTTPFTVTASRGLTVGPDMDYLVVKPAGSDRQYVVAEGLLDSLAGKFGWESFETLASHKGADLEYIVTEHPWDTDVEELVILGDHVTLESGTGIVHTAPGFGEDDYNVGTKYKLEVAVTVDERGLMMENAGPDFHGQFYNKVTPIVIDKLGDLLLAQEVINHSYPFDWRTKKPIIWRAVPQWFASVSDFRQDILDEIEKTTFHPSWGETRLYNMIRDRGDWVISRQRAWGVPLPIFYAEDGTAIMTKEVTDHVADLFQENGSIIWWQKEAKDLLPEGFTHPGSPNGEFTKETDIMDVWFDSGSSWNGVMNTKENLSYPADLYLEGSDQYRGWFNSSLITSVAVNGHAPYKAILSQGFVLDGKGEKMSKSKGNIISPNDVAKQYGADILRLWVASVDTDNDVRVSMEILGQVSETYRKIRNTLRFLIANTSDFNPATDTVAYADLGTVDKYMTIVFNQLVATITDAYERYDFMAIYKAVVNFVTVDLSAFYLDFAKDVVYIEAANSLERRRMQTVFYDILVKITKLLTPILPHTTEEIWSYLEHESEAFVQLAEMPVAETFSAQEDILEAWSAFMTLRTQAQKALEEARNAKIIGKSLEAHLTIYASEEVKTLLTALDSDIALLLIVSQLTIADLADAPADAVAFEGVAFIVEHAIGEVCERSRRIDPTTRMRSYNAFVCDHSAKIIEENFPEAVAEGFEESGK

SEQ ID NO: 74647 - protein, 252 aa, Streptococcus pyogenes
MALTTLEIKDKTFKTKFRGYCEEEVNEFLDIVVDDYEALVRKNRDNEARIKDLEEKLSYFDEMKESLSQSVILAQETAEKVKATANAEATNLVSKATYDAQHLLDESKAKANQMLRDATDEAKRVAIETEELKRQTRVFHQRLISSIESQLSLSNSPEWDELLQPTAIYLQNSDDAFKEVVKTVLNEDIPESDDSASFDATRQFTPEELEELQRRVDESNKELEAYQLDSQSDSTTEPEVNLSETQTFKLNI

SEQ ID NO: 74648 - protein, 218 aa, Streptococcus pyogenes
MAFKDTFNKMISYFDTDEVNEVEEDVAASTDNVIPRSQQSVRASSHPKQEPRNNHVQQDHQARSQEQTRSQMHPKHGTSERYYQQSQPKEGHEMVDRRKRMSTSSIANRREQYQQSTCSDQTTIALKYPRKYEDAQEIVDLLIVNECVLIDFQFMLDAQARRCLDFIDGASKVLYGSLQKVGSSMYLLAPSNVSVNIEEMTIPHTTQDIGFDFDMKRR

SEQ ID NO: 74649 - protein, 223 aa, Streptococcus pyogenes
MDLLTNKKKIFETIRLSTEAANRTNDSVSVIAVTKYVDSTIAGQLIEAGIEHIAENRVDKFLEKYDALKYMPVKWHLIGTLQRRKVKEVINYVDYFHALDSVRLALEINKRADHPVKCFLQVNISKEESKHGFNISEIDEAIGEIGKMEKIQLVGLMTMAPANASKESIITIFRQANQLRKNLQLKKRKNMPFTELSMGMSNDYPIAIQEGSTFIRIGRAFFH

SEQ ID NO: 74650 - protein, 439 aa, Streptococcus pyogenes
MAFSFDTASIQGAIIKVIGVGGGGGNAINRMIDEGVAGVEFIAANTDIQALSSSKAETVIQLGPKLTRGLGAGGQPEVGRKAAEESEEILTEALTGADMVFITAGMGGGSGTGAAPVIARIAKSLGALTVAVVTRPFGFEGNKRGNFAIEGIEELREQVDTLLIISNNNLLEIVDKKTPLLEALSEADNVLRQGVQGITDLITSPGLINLDFADVKTVMANKGNALMGIGIGSGEERIVEAARKAIYSPLLETTIDGAQDVIVNVTGGLDMTLTEAEEASEIVGQAAGQGVNIWLGTSIDDTMKDDIRVTVVATGVRQEKAEQVSGFRQPRTFTQTNAQQVAGAQYASDQAKQSVQPGFDRRSNFDFDMGESREIPSAQKVISNHNQNQGSAFGNWDLRRDNISRPTEGELDNHLNMSTFSANDDSDDELETPPFFKNR

SEQ ID NO: 74651 - protein, 454 aa, Streptococcus pyogenes
MARNGFFTGLDIGTSSIKVLVAEFISGEMNVIGVSNVPSTGVKDGIIIDIEAAATAIKTAVEQAEEKAGMTIEKVNVGLPANLLQIEPTQGMIPVPSESKEIKDEDVDSVVKSALTKSITPEREVISLVPEEFIVDGFQGIRDPRGMMGIRLEMRGLIYTGPSTILHNLRKTVERAGIKVENIIISPLAMAKTILNEGEREFGATVIDMGGGQTTVASMRAQELQYTNIYAEGGEYITKDISKVLKTSLAIAEALKFNFGQAEISEASITETVKVDVVGSEEPVEVTERYLSEIISARIRHILDRVKQDLERGRLLDLPGGIVLIGGGAIMPGVVEIAQEIFGVTVKLHVPNQVGIRNPMFSNVISLVEYVGMMSEVDVLAQTAVSGEELLRRKPIDFSGQESYLPDYDDSRRPESTIGYEQQASQTAYDSQVPSDPKQKISERVRGIFGSMFD

SEQ ID NO: 74652 - protein, 382 aa, Streptococcus pyogenes
MAKDKEKQSDDKLVLTEWQKRNIEFLKKKKQQAEEEKKLKEKLLSDKKAQQQAQNASEAVELKTDEKTDSQEIESETTSKPKKTKKVRQPKEKSATQIAFQKSLPVLLGALLLMAVSIFMITPYSKKKEFSVRGNHQTNLDELIKASKVKASDYWLTLLTSPGQYERPILRTIPWVKSVHLSYQFPNHFLFNVIEFEIIAYAQVENGFQPILENGKRVDKVRASELPKSFLILNLKDEKAIQQLVKQLTTLPKKLVKNIKSVSLANSKTTADLLLIEMHDGNVVRVPQSQLTLKLPYYQKLKKNLENDSIVDMEVGIYTTTQEIENQPEVPLTPEQNAADKEGDKPGEHQEQTDNDSETPANQSSPQQTPPSPETVLEQAHG

SEQ ID NO: 74653 - protein, 360 aa, Streptococcus pyogenes
MPKKILFTGGGTVGHVTLNLILIPKFIKDGWEVHYIGDKNGIEHTEIEKSGLDVTFHAIATGKLRRYFSWQNLADVFKVALGLLQSLFIVAKLRPQALFSKGGFVSVPPVVAAKLLGKPVFIHESDRSMGLANKIAYKFATTMYTTFEQEDQLSKVKHLGAVTKVFKDANQMPESTQLEAVKEYFSRDLKTLLFIGGSAGAHVFNQFISDHPELKQRYNIINITGDPHLNELSSHLYRVDYVTDLYQPLMAMADLVVTRGGSNTLFELLAMAKLHLIVPLGKEASRGDQLENATYFEKRGYAKQLQEPDLTLHNFDQAMADLFEHQADYEATMLATKEIQSPDFFYDLLRADISSAIKEK

SEQ ID NO: 74654 - protein, 452 aa, Streptococcus pyogenes
MKVISNFQNKKILILGLAKSGEAAAKLLTKLGALVTVNDSKPFDQNPAAQALLEEGIKVICGSHPVELLDENFEYMVKNPGIPYDNPMVKRALAKEIPILTEVELAYFVSEAPIIGITGSNGKTTTTTMIADVLNAGGQSALLSGNIGYPASKVVQKAIAGDTLVMELSSFQLVGVNAFRPHIAVITNLMPTHLDYHGSFEDYVAAKWMIQAQMTESDYLILNANQEISATLAKTTKATVIPFSTQKVVDGAYLKDGILYFKEQAIIAATDLGVPGSHNIENALATIAVAKLSGIADDIIAQCLSHFGGVKHRLQRVGQIKDITFYNDSKSTNILATQKALSGFDNSRLILIAGGLDRGNEFDDLVPDLLGLKQMIILGESAERMKRAANKAEVSYLEARNVAEATELAFKLAQTGDTILLSPANASWDMYPNFEVRGDEFLATFDCLRGDA

SEQ ID NO: 74655 - protein, 613 aa, Streptococcus pyogenes
MTNLRNDIRNVAIIAHVDHGKTTLVDELLKQSHTLDERKELQERAMDSNDLEKERGITILAKNTAVAYNDVRINIMDTPGHADFGGEVERIMKMVDGVVLVVDAYEGTMPQTRFVLKKALEQNLIPIVVVNKIDKPSARPAEVVDEVLELFIELGADDEQLEFPVVYASAINGTSSLSDDPADQEHTMAPIFDTIIDHIPAPVDNSDEPLQFQVSLLDYNDFVGRIGIGRVFRGTVKVGDQVTLSKLDGTTKNFRVTKLFGFFGLERREIQEAKAGDLIAVSGMEDIFVGETITPTDCVEALPILRIDEPTLQMTFLVNNSPFAGREGKWITSRKVEERLLAELQTDVSLRVDPTDSPDKWTVSGRGELHLSILIETMRREGYELQVSRPEVIIKEIDGVKCEPFERVQIDTPEEYQGAIIQSLSERKGDMLDMQMVGNGQTRLIFLIPARGLIGYSTEFLSMTRGYGIMNHTFDQYLPVVQGEIGGRHRGALVSIENGKATTYSIMRIEERGTIFVNPGTEVYEGMIVGENSRDNDLGVNITTAKQMTNVRSATKDQTAVIKTPRILTLEESLEFLNDDEYMEVTPESIRLRKQILNKAARDKANKKKKSAE

SEQ ID NO: 74656 - protein, 129 aa, Streptococcus pyogenes
MSPITLILWLLLVGIVGYYTWNYFSFRKMAKQVDNETFKDVMRQGQLIDLREPAAFRTKHILGARNFPAQQFDAAIKGLRKDKPVLIYENMRPQYRVPAVKKLKKAGFEDVYVLKDGIDYWDGKVKQTT

SEQ ID NO: 74657 - protein, 323 aa, Streptococcus pyogenes
MSQKLLGIDLGGTTIKFGILTAAGEVQEKWAIETNILEGGKHIVPDIIASIKHRLDLYGLSSADFVGIGMGSPGAVDRDTNTVTGAFNLNWKETQEVGSVVEKELGIPFAIDNDANVAALGERWVGAGENNPDVVFMTLGTGVGGGIIADGNLIHGVAGAGGEIGHMIVEPENGFACTCGSHGCLETVASATGVVKVARLLAEAYEGDSAIKAAIDNGEGVTSKDIFMAAEAGDSFADSVVEKVGYYLGLASANISNILNPDSVVIGGGVSAAGEFLRSRIEKYFVTFTFPQVRYSTKIKIAELGNDAGIIGAASLARQFITK

SEQ ID NO: 74658 - protein, 175 aa, Streptococcus pyogenes
MTNTLVENIYASVTHNISKKEASKNEKTKAVLNQAVADLSVAASIVHQVHWYMRGPGFLYLHPKMDELLDSLNANLDEMSERLITIGGAPYSTLAEFSKHSKLDEAKGTYDKTVAQHLARLVEVYLYLSSLYQVGLDITDEEGDAGTNDLFTAAKTEAEKTIWMLQAERGQGPAL

SEQ ID NO: 74659 - protein, 214 aa, Streptococcus pyogenes
MDFSERCQMKKEISPEMYNYNKFPGPKFIHFEEQVKAEGIDLLLLEDVKNAFDTTSFGQRYTEVLLKYDYIVGDWGNEQLRLKGFYKDSDDIKKTNRISRLEDYIKEFCNFGCAYFVLENLHPQDIKFEEERQPRRKKSPKSKSNRRKPNYSNQQPATPKSKSKRASKEKQPENQAFTSQKRRSNTKHKEKSKRNQTSQLNTKISHFIIRKKDK

SEQ ID NO: 74660 - protein, 316 aa, Streptococcus pyogenes
MTKQKIVVALGGNAILSTDASAKAQQEALISTSKSLVKLIKEGHEVIVTHGNGPQVGNLLLQQAAADSEKNPAMPLDTCVAMTEGSIGFWLVNALDNELQAQGIQKEVAAVVTQVIVDAKDPAFENPTKPIGPFLTEEDAKKQMAESGASFKEDAGRGWRKVVPSPKPVGIKEANVIRSLVDSGVVVVSAGGGGVPVVEDATSKTLTGVEAVIDKDFASQTLSELVDADLFIVLTGVDNVYVNFNKPDQAKLEEVTVSQMKEYITQDQFAPGSMLPKVEAAIAFVENKPNAKAIITSLENIDNVLSANAGTQIIAG

SEQ ID NO: 74661 - protein, 497 aa, Streptococcus pyogenes
MTEEKKRGFRIPSSYTVLFIIIAIMAVLTWFIPAGAYETAKGGGVISGTYKTVASNPQGFFDILMAPVRGMLGVEGTDGAIQVSFFILMVGGFLGVVNKTGALDTGIASVVRKNKGREKMLIAILIPLFALGGTTYGMGEETMAFYPLLIPVMIAVGFDSIVAVAIILIGSQIGCLASTINPFATGVAADAAGVSIADGMIWRVIQWVILVGMSIWFVYNYASKIEEDPSKSLVADKEEEHKELFQLQNSGEDLNKRQRNVLTIFTLTFVIMILSLIPWEDFGIKFFTNINTWLTTMPILGGVIGKTMGAFGTWYFPEITMLFIMMGVLVAIVYRMSEEDFFSSFLTGAGEFLGVAMICAIARGIQVIMNGGMITATILHLGETSLSGLSSQVFVILAYIFYLPMSFLIPSTSGLAGATMGIMAPLGQFSNVPAHLVITAFQSASGILNMISPTSAIVMGALALGRVDLGTWWKFIGKFIVMVMLVSVLLLVVATFF

SEQ ID NO: 74662 - protein, 337 aa, Streptococcus pyogenes
MTQVFQGRSFLAEKDFTRAELEYLIDFSAHLKDLKKRGVPHHYLEGKNIALLFEKTSTRTRAAFTTAAIDLGAHPEYLGANDIQLGKKESTEDTAKVLGRMFDGIEFRGFSQRMVEELAEFSGVPVWNGLTDEWHPTQMLADYFTVKENFGKLEGLTLVYCGDGRNNVANSLLVTGAILGVNVHIFSPKELFPEEEIVTLAEGYAKESGARILITEDADEAVKGADVLYTDVWVSMGEEDKFKERVELLQPYQVNMDLVQKAGNDKLIFLHCLPAFHDTNTVYGKDVAEKFGVKEMEVTDEVFRSKYARHFDQAENRMHTIKAVMAATLGNLFIPKV

SEQ ID NO: 74663 - protein, 882 aa, Streptococcus pyogenes
MTELSPKYNPAEVEAGRYQKWLDADVFKPSGDQKAKPYSIVIPPPNVTGKLHLGHAWDTTLQDIIIRQKRMQGFDTLWLPGMDHAGIATQAKVEERLREQGISRYDLGRDKFLDKVWEWKDEYATTIKEQWGKMGLSVDYSRERFTLDEGLSKAVRKVFVDLYKKGWIYRGEFIINWDPAARTALSDIEVIHKDVEGAFYHMNYMLEDGSRALQVATTRPETMFGDVAVAVNPEDPRYKDLIGKNVILPIVNKLIPIVGDEHADPEFGTGVVKITPAHDPNDFEVGQRHNLPQVNVMNDDGTMNELAGDFAGMDRFEARQATVAKLEELGALVNIEKRVHSVGHSERSGAVVEPRLSTQWFVKMDELAKQAMDNQETDDRVDFYPPRFNDTFLQWMENVHDWVISRQLWWGHQIPAWYNAEGEIYVGEEAPEGDDWTQDEDVLDTWFSSALWPFSTMGWPDTDVEDFKRYFPTSTLVTGYDIIFFWVSRMIFQSLEFTGRQPFQNVLIHGLIRDEEGRKMSKSLGNGIDPMDVIEKYGADSLRWFLSNGSAPGQDVRFSYEKMDASWNFINKIWNISRYILMNNEGLTLEDAESNVAKVAASEAGNVTDQWILHNLNETIAKVTENFDKFEFGVAGHILYNFIWEEFANWYVELTKEVLYSDNEAEKVITRSVLLYTLDKILRLLHPIMPFVTEEIYAQYAQGSIVTVDYPVVRPAFENEAAHKGVESLKDLIRAVRNARAEVNVAPSKPITILVKTADSELEDFFNSNINYIKCFTNPEKLEISSAIAAPELAMTSIITGAEIYLPLADLLNVEEELARLDKELAKWQKELDMVGKKLGNERFVANAKPEVVQKEKDKQADYQAKYDATQERIAEMKKIKS

SEQ ID NO: 74664 - protein, 250 aa, Streptococcus pyogenes
MIDIMSDFQNKTCSKNNFIVGPCSIESYDHIRLAASSAKKLGYNYFRGGAYKPRTSAASFQGLGLQGIRYLHEVCQEFGLLSVSEIMSERQLEEAYDYLDVIQVGARNMQNFEFLKTLSHIDKPILFKRGLMATIEEYLGALSYLQDTGKSNIILCERGVRGYDVETRNMLDIMAVPIIQQKTDLPIIVDVSHSTGRRDLLLPAAKIAKAVGANGIMMEVHPDPDHALSDAAQQIDYKQLEQLGQELWQD

SEQ ID NO: 74665 - protein, 292 aa, Streptococcus pyogenes
MSERLSGHTLLVSLLATPIRHSLSPKMHNEAYAKLGLDYAYLAFEVGTEQLADAVQGIRALGIRGSNVSMPNKEAILPLLDDLSPAAELVGAVNTVVNKDGKGHLVGHITDGIGALRALADEGVSVKNKIITLAGVGGAGKAIAVQLAFDGAKEVRLFNRQATRLSSVQKLVTKLNQLTRTKVTLQDLEDQTAFKEAIRESHLFIDATSVGMKPLENLSLITDPELIRPDLVVFDIVYSPAETKLLAFARQHGAQKVINGLGMVLYQGAEAFKLITGQDMPVDAIKPLLGDE

SEQ ID NO: 74666 - protein, 574 aa, Streptococcus pyogenes
MSVKTLGRYVTNHFKQGFLINRLMKLYSLLIVSFFTLAAIGLSSYSISSTYKRVDAEAQMRLEETLGRLQSQNDITLRVLDQLVGRSEDYHNLYQYMTLTPNQYFSNVFEDWEKGKDTVLFSEEVRRLFDLYPDVTSMTLLLEDSSAYLYADKVIKTGRLLYSKPEKVTGNVLVRSIRNPESGDVTGRLYLTFDKPPTLVETQQDHYLATFAFDYYGRKLFHQGGRRFPHLEAEVKKAIKADRAADLSNLSKAYRMQYNRSGDLLAYVAVRKSYLLAEAVRTVFVYGLVSLLLAWLLLQLLFRVFRNYIQQVSEITDTVEMVAAGDLSLTIDNSHMELELYHISEAINQMLASIKAYIDEVYVLEVEQRDAQMRALQSQINPHFLYNTLEYIRMYALSCQQEELADVIYAFASLLRNNISQDKMTTLKEELAFCEKYIYLYQMRYPDSFAYHVKIDESVADLAIPKFVIQPLVENYFVHGIDYSRHDNALSIKALDETDHLLIQVLDNGRGISQERLADMEKRLQEHQTTGNSSIGLQNVYLRLFHHFRDRVSWSMAKEPNGGFIIQIRIRKDA

SEQ ID NO: 74667 - protein, 258 aa, Streptococcus pyogenes
MKITKIEKKKRLYLIELDNDESLYVTEDTIVRFMLSKDKVLDNDQLEDMKHFAQLSYGKNLALYFLSFQQRSNKQVADYLRKHEIEEHIIADIITQLQEEQWIDDTKLADTYIRQNQLNGDKGPQVLKQKLLQKGIASHDIDPILSQTDFSQLAQKVSQKLFDKYQEKLPPKALKDKITQALLTKGFSYDLAKHSLNHLNFDQDNQEIEDLLDKELDKQYRKLSRKYDGYTLKQKLYQALYRKGYNSDDINCKLRNYL

SEQ ID NO: 74668 - protein, 313 aa, Streptococcus pyogenes
MTKIYKTITELVGQTPIIKLNRLIPNEAADVYVKLEAFNPGSSVKDRIALSMIEAAEAEGLISPGDVIIEPTSGNTGIGLAWVGAAKGYRVIIVMPETMSLERRQIIQAYGAELVLTPGAEGMKGAIAKAETLAIELGAWMPMQFNNPANPSIHEKTTAQEILEAFKEISLDAFVSGVGTGGTLSGVSHVLKKANPETVIYAVEAEESAVLSGQEPGPHKIQGISAGFIPNTLDTKAYDQIIRVKSKDALETARLTGAKEGFLVGISSGAALYAAIEVAKQLGKGKHVLTILPDNGERYLSTELYDVPVIKTK

SEQ ID NO: 74669 - protein, 334 aa, Streptococcus pyogenes
MKKRYYALVWLYSTITILSIVFVVMDNLGITFNYLRNHLWQVERLGFSILLLIVSVTLLLLLLWIIMDDNSKRNINQNLKYILNNRRLYLDETSEINTNLSRLSKKMSHLTANMQKKESAYILDSQEVVKQERKRIARDLHDTVSQELFASSLILSGISMSLEQLDKTQLQTQLTTVEAMLQNAQNDLRILLLHLRPTELANRTLSEGLHMILKELTDKSDIEVIYKETIAQLPKTMEDNLFRIAQEFISNTLKHAKASRIEVYLNQTSTELQLKMIDDGVGFDMDQVRDLSYGLKNIEDRVNDLAGNLHLISQKGKGVSMDIRLPIVKGDDDE

SEQ ID NO: 74670 - protein, 632 aa, Streptococcus pyogenes
MIQIGKLFAGRYRILKSIGRGGMADVYLANDLILDNEDVAIKVLRTNYQTDQVAVARFQREARAMAELNHPNIVAIRDIGEEDGQQFLVMEYVDGADLKRYIQNHAPLSNNEVVRIMEEVLSAMTLAHQKGIVHRDLKPQNILLTKEGVVKVTDFGIAVAFAETSLTQTNSMLGSVHYLSPEQARGSKATIQSDIYAMGIMLFEMLTGHIPYDGDSAVTIALQHFQKPLPSIIEENHNVPQALENVVIRATAKKLSDRYGSTFEMSRDLMTALSYNRSRERKIIFENVESTKPLPKVASGPTASVKLSPPTPTVLTQESRLDQTNQTDALQPPTKKKKSGRFLGTLFKILFSFFIVGVALFTYLILTKPTSVKVPNVAGTSLKVAKQELYDVGLKVGKIRQIESDTVAEGNVVRTDPKAGTAKRQGSSITLYVSIGNKGFDMENYKGLDYQEAMNSLIETYGVPKSKIKIERIVTNEYPENTVISQSPSAGDKFNPNGKSKITLSVAVSDTITMPMVTEYSYADAVNTLTALGIDASRIKAYVPSSSSATGFVPIHSPSSKAIVSGQSPYYGTSLSLSDKGEISLYLYPEETHSSSSSSSSTSSSNSSSINDSTAPGSNTELSPSETTSQTP

SEQ ID NO: 74671 - protein, 440 aa, Streptococcus pyogenes
MADNWKKSTRGKALLVIEAIFDQGAYTNIALNQQLSNKALSAKDRALLTEIVYGTVSRKISLEWYLAHYVKDRDKLDKWVYYLLMLSLYQLTYLDKLPAHAIVNDAVGIAKNRGNKKGAEKFVNAILRQFTSHPLPDMETIKRRNKYYSVKYSLPVWLVKKLEDQFGSDRSVAIMESLFVRSKASIRVTDPLKLEEVAEALDAERSLLSATGLTKASGHFAASDYFTNGDITIQDESSQLVAPTLNIDGDDIILDACSAPGGKTSHIASYLKTGKVIALDLYDHKLELVKENANRLGVADNIETRKLDAREVHRHFEKDSFDKILVDAPCSGIGLIRRKPDIKYNKESQGFNALQAIQLEILSSVCQTLRKGGIITYSTCTIFDEENRQVIEAFLQSHPNFEQVKLNHTQADIVKDGYLIITPEQYQTDGFFIGQVRRVL

SEQ ID NO: 74672 - protein, 535 aa, Streptococcus pyogenes
MVNIILLIVSALIGLILGYALISIRLKSAKEAAELTLLNAEQEAVDIRGKAEVDAEHIKKTAKRESKANRKELLLEAKEEARKYREEIEQEFKSERQELKQLETRLAERSLTLDRKDENLSSKEKVLDSKEQSLTDKSKHIDERQLQVEKLEEEKKAELEKVAAMTIAEAREVILMETENKLTHEIATRIRDAERDIKDRTVKTAKDLLAQAMQRLAGEYVTEQTITSVHLPDDNMKGRIIGREGRNIRTLESLTGIDVIIDDTPEVVILSGFDPIRREIARMTLESLIADGRIHPARIEELVEKNRLEMDNRIREYGEAAAYEIGAPNLHPDLIKIMGRLQFRTSFGQNVLRHSVEVGKLAGILAGELGENVALARRAGFLHDMGKAIDREVEGSHVEIGMEFARKYKEHPVVVNTIASHHGDVEPDSVIAVLVAAADALSSARPGARNESMENYIKRLRDLEEIATSFDGVQNSFALQAGREIRIMVQPEKISDDQVVILSHKVREKIENNLDYPGNIKVTVIREMRAVDYAK

SEQ ID NO: 74673 - protein, 395 aa, Streptococcus pyogenes
MKNIVIVEALRTPIGAFGGSFKSVSAVELGTTVLKKILDKTQVKPEMVDEVILGNVLHAGLGQNVARQVAVHSGIPEDKTAFTLDMVCGSGLKAIQLAAQSIMLGDADIVIAGGVENMSQATYVSTQHRFGQRLGNSQLIDTLVHDGLTDAFNNYHMGITAENVAQKYGISREEQDQFALESQEKAAKALENHRFADEIVPVSVPQRRKDPLIVTTDEYPKVDTSLEKLQQLRPAFLPKEGTVTAGNASGINDGAALLMLMTEEKALELGLTPLVTIESYASAGVAPELMGTGPIPATQKALKKAGLTISDLDLVESNEAFAAQSLAVLKDLKLNPEIVNVNGGAIALGHPIGASGARILVTLIHEMKKRQVTRGLATLCIGGGQGTAVIVKNNT

SEQ ID NO: 74674 - protein, 108 aa, Streptococcus pyogenes
MTSIIYSPKDIFEQEFKTSMRGFDKKEVDEFLDNVIKDYENFNAQIEALKAENEALKKAKFQARNTVSATVQQPVPQPTRVAQSATNFDILKRISKLEKEVFGKQIIE

SEQ ID NO: 74675 - protein, 721 aa, Streptococcus pyogenes
MITIKNPKILKWLKYVLSAILSLIILVIIIGGLLFTFYISSAPKLSEAQLKSTNSSLVYDGNNNLIADLGSEKRENVTADSIPINLVNAITSIEDKRFFNHRGVDLYRIFGAAFHNLTSQTTQGGSTLDQQLIKLAYFSTNESDQTLKRKAQEVWLALQMERKYTKQEILTFYINKVYMGNGNYGMLTAAKSYYGKDLKDLSYAQLALLAGIPQAPSQYDPYLHPEAAQNRRNVVLQQMYMEKHLTKAEYETAIATPVAEGLQSLQQRSTYPKYMDNYLKQVIEEVKKETNKDIFTAGLKVYTNIIPDAQQTLYNIYHSGDYVYYPDQDFQVASTIVDVTNGHVIAQLGGRNQDENVSFGTNQAVLTDRDWGSTMKPITAYAPAIESGVYTSTAQSTNDSVYYWPGTTTQLFNWDLRYNGWMTIQAAIMLSRNVPAVRALEAAGLDYARSFLSSLGINYPEMHYSNAISSNNSSSDKKYGASSEKMAAAYAAFANGGIYHKPRYVNKVEFSDGTSKTFDEKGKRAMKETTAYMMTDMLKTVLTYGTGTAAAIPGVAQAGKTGTSNYTDEELAKIGEKYGLYPDYVGTLAPDENFVGFTKRYAMAVWTGYKNRLTPVYGSSLEIASDVYRSMMTYLTNGYSEDWTMPNGLYRSGGFLYLSGTYASNTDYTNSVYNNLYSNNTTTASSQTTSDDTSSSNDTSNSTNTDNNGSHPSTDDKKTTH

SEQ ID NO: 74676 - protein, 274 aa, Streptococcus pyogenes
MTLQEEIIRQLGVKASIDPQEEIRKAVDFLKAYLRKHSFLKTYVLGISGGQDSTLAGKLAQMAIAELREEASDQAYQFIAVRLPYGVQADEADAQKALAFIAPDQTLTINIKAAVDGQVEALQAAGVEISDFNKGNIKARQRMISQYAIAGQMAGAVIGTDHAAENITGFFTKFGDGGADILPLFRLNKRQGKALLKVLGADAALYEKVPTADLEDQKPGLADEVALGVTYQDIDDYLEGKLISKVAQATIEKWWHKGQHKRHLPITIFDDFWK

SEQ ID NO: 74677 - protein, 484 aa, Streptococcus pyogenes
MYKDDSLTLHTDLYQINMMQVYFEQGIHNRHAVFEVYFRKEPFNNGYAVFAGLQRMVEYLEQFQFSETDLAYLEELGYPENFLTYLKELRLELTIRSAKEGDLVFANEPIVQVEGPLGQCQLVETALLNIVNFQTLIATKAARIRSVIEDEPLLEFGTRRAQELDAAIWGTRAAMIGGADATSNVRAGKRFDIPVSGTHAHALVQAYGNDYDAFMAYAKTHKDCVFLVDTYDTLKVGVPTAIRVAKEMGDKINFLGVRLDSGDLAYLSKTVRQQLDDAGFTEAKIYASNDLDENTILNLKMQKAKIDVWGVGTKLITAYDQPALGAVYKIVSIEQEDGSMRDTIKLSNNAEKVSTPGKKQVWRITSREKGKSEGDYITFTDINVNELTEIEMFHPTYTYIKKTVKEFDAIPLLVDIFVKGELVYQLPTLAEIKAYAKKEFDKLWDEYKRVLNPQDYPVDLARDVWQNKMALIDNIRKDAYGKSE

SEQ ID NO: 74678 - protein, 447 aa, Streptococcus pyogenes
MSFKDYHFKQYVQQALEEIGFVNPTEVQKRLIPIVNSGRDLVGESKTGSGKTHTFLLPIFEKLDEAKAEVQVVITAPSRELATQIFDACKQIAKHFQEEIRLANYVGGTDKLRQIEKLKDSQPHIVIGTPGRIYDLVKSGDLAIHKATTFVVDEADMTMDMGFLDTVDKIAASLPKSVQILVFSATIPQKLQPFLKKYLTNPVIEQIKTKTVIADTIDNWLVSTKGRDKNGQLLEILKTMQPYMAMLFVNTKERADDLHAFLTANGLKVAKIHGGIPPRERKRIMNQVKKLDFEYIVATDLAARGIDIEGVSHVINDAIPQDLSFFVHRVGRTGRNGMAGTAITLYQPSDDSDIKELEKMGIAFTPKVLKNGEFQDTYDRDRRQNREKAYQKLDTEMIGLVKKKKKKVKPGYKKKIQWAVDEKRRKERRAENRAKGRAERKAKKQHF

SEQ ID NO: 74679 - protein, 336 aa, Streptococcus pyogenes
MFLTLIAAIISFMVSAFTMPYFIKFYQLKKIGGQQMHEDVKQHLAKAGTPTMGGTVFLLVATAVSLLVSLFSIKNTQSLALISGILSIVVIYGIIGFLDDFLKIFKQINEGLTAKQKLALQLVGGLMFYFLHVSPSGISSINVFGYQLPLGIFYLFFVLFWVVGFSNAVNLTDGIDGLASISVVISLVTYGVIAYVQSQFDVLLLIGAMIGALLGFFCFNHKPAKVFMGDVGSLALGAMLAAISIALRQEWTLLIIGIVYVLETSSVMLQVSYFKYTKKKYGEGRRIFRMTPFHHHLELGGLSGKGKKWSEWQVDAFLWGVGSLASLLVLAILYVF

SEQ ID NO: 74680 - protein, 751 aa, Streptococcus pyogenes
MKKWQKYVLDYVVRDRRTPVENRVRVGQNMMLLTIFIFFIFIINFMIIIGTDQKFGVSLSEGAKKVYQETVTIQAKRGTIYDRNGTAIAVDSTTYSIYAILDKSFVSASDEKLYVQPSQYETVADILKKHLGMKKTDVIKQLKRKGLFQVSFGPSGSGISYSTMSTIQKAMEDAKIKGIAFTTSPGRMYPNGTFASEFIGLASLTEDKKTGVKSLVGKTGLEASFDKILSGQDGVITYQKDRNGTTLLGTGKTVKKAIDGKDIYTTLSEPIQTFLETQMDVFQAKSNGQLASATLVNAKTGEILATTQRPTYNADTLKGLENTNYKWYSALHQGNFEPGSTMKVMTLAAAIDDKVFNPNETFSNANGLTIADATIQDWSINEGISTGQYMNYAQGFAFSSNVGMTKLEQKMGNAKWMNYLTKFRFGFPTRFGLKDEDAGIFPSDNIVTQAMSAFGQGISVTQIQMLRAFTAISNNGEMLEPQFISQIYDPNTASFRTANKEIVGKPVSKKAASETRQYMIGVGTDPEFGTLYSKTFGPIIKVGDLPVAVKSGTAQIGSEDGSGYQDGGLTNYVYSVVAMVPADKPDFLMYVTMTKPQHFGPLFWQDVVNPVLEEAYLMQDTLTKPVVSDANRQTTYKLPNFVGKNPGETSSELRRNLVQPVVLGTGSKIKKVSHQPGQTLTENQQVLILSDRFVEVPDMYGWTKSNVKTFAKWTGIDISFKGTDSGRVMKQSVDVGKSLKKIKKMTITLGD

SEQ ID NO: 74681 - protein, 107 aa, Streptococcus pyogenes
MTNEKRTQVVTNALQKRIKTFSRIEKAFYTAIIVTAITMAVSIIYLQSRKLQLQQEITSLNSHISDQKLELNNAKQEVNELSRRDRIIDIAGKAGLSNRNNNIKKVE

SEQ ID NO: 74682 - protein, 337 aa, Streptococcus pyogenes
MKSFSLTFSFLNLLKYGTIKVMTKEFHHVTVLLHETVDMLDIKPDGIYVDATLGGSGHSAYLLSKLGEEGHLYCFDQDQKAIDNAQVTLKSYIDKGQVTFIKDNFRHLKARLTALGVDEIDGILYDLGVSSPQLDERERGFSYKQDAPLDMRMDRQSLLTAYEVVNTYPFNDLVKIFFKYGEDKFSKQIARKIEQARAIKPIETTTELAELIKAAKPAKELKKKGHPAKQIFQAIRIEVNDELGAADESIQDAMELLALDGRISVITFHSLEDRLTKQLFKEASTVDVPKGLPLIPEDMKPKFELVSRKPILPSHSELTANKRAHSAKLRVAKKIRK

SEQ ID NO: 74683 - protein, 416 aa, Streptococcus pyogenes
MTDMRRLGQRAKQASLLIAPLSTQIKNRFLSTLAKALVDDTQTLLAANQKDLANAKEHGISDIMMDRLRLTSERIKAIAQGVQQVADLADPIGQVIKGYTNLDGLKILQKRVPLGVIAMIFESRPNVSVDAFSLAFKTNNAIILRGGKDALHSNKALVKLIRQSLEKSGITPDAVQLVEDPSHAVAEELMQATDYVDVLIPRGGAKLIQTVKEKAKVPVIETGVGNVHIYVDAQADLDIATKIVINAKTKRPSVCNAAEGLVIHEAVAARFIPMLEKAINQVQPVEWRADDKALPLFEQAVPAKAEDFETEFLDYIMSVKVVSSLEEAISWINQYTSHHSEAIITRDIKAAETFQDLVDAAAVYVNASTRFTDGFVFGLGAEIGISTQKMHARGPMGLEALTSTKFYINGDGHIRE

SEQ ID NO: 74684 - protein, 711 aa, Streptococcus pyogenes
MMSKLVFFWQNREKEFRDFGGFSEKSVYFCDTIDNRKRLILVVINREVLLMTFDAIDQLAVNTVRTLSMDAIQAANSGHPGLPMGAAPMAYVLWNHFMNINPKTSRNWSNRDRFILSAGHGSAMLYSLLHLAGYDLSVEDLKNFRQWGSKTPGHPEVNHTDGVEATTGPLGQGIANAVGMAMAEAHLAAKFNKPGFDIVDHYTFALNGDGDLMEGVSQEAASMAGHLKLGKLVLLYDSNDISLDGPTSMAFTEDVKGRFEAYGWQHILVKDGNDLEEIAAAIEAAKAETEKPTIIEVKTIIGFGAEKQGTSAVHGAPLGAEGIAFAKKAYQWTHQDFEVPAEVTERFAQGLQARGEKAEQAWNDLFAAYEAEYPELAAEYQKAFTNEAAQVELEAHELGSSMASRVSSQQAIQQISEQVASFWGGSADLSASNNTMVKAETDFQPGHYEGRNIWFGVREFAMAAAMNGIALHGGTRVYGGTFFVFSNYLLPAVRMAALQNLPTVYVMTHDSIAVGEDGPTHEPIEQLASVRSMPNLNVIRPADGNETNAAWKRAIAETDRPTMLVLTRQNLPVLEGTKELAEDGLSKGAYILSEAKGDLDGILIATGSEVKLAMDTQEALEAEGIHVRVVSMPSQNIFDEQSAEYKESILPAAVTKRLAIEAGSSFGWAKYVGLSGKTLTIDTWGASAPGNRIFEEYGFTVANATELYKSL

SEQ ID NO: 74685 - protein, 233 aa, Streptococcus pyogenes
MDIFGEFLGTALLVLLGNGVVAGVVLPKTKTHASGWIVIATGWGIAVAVAVFISGKVAPAHLNPAVSLAFAMSGTIAWSTAIAYSLAQLLGAMVGSTLVFLQFRPHYLAAESQADILGTFATGPAIRDTSSNLLSEIFGTFVLMLGILAFGLYDMPAGLGTLCVGTLVIGIGLSLGGTTGYAINPARDLGPRLVHAILPLNNKGDSDWSYAWIPVVGPIIGAVLAVLLFQVMS

SEQ ID NO: 74686 - protein, 508 aa, Streptococcus pyogenes
MSQEKYIMAIDQGTTSSRAIIFNQKGEKVSSSQKEFPQIFPHAGWVEHNANQIWNSVQSVIAGAFIESSIKPSQIEAIGITNQRETTVVWDKKTGVPIYNAIVWQSRQTAPIAEQLKQDGHTKMIHEKTGLVIDAYFSATKIRWILDHVPGAQERAEKGELLFGTIDTWLVWKLTDGAVHVTDYSNAARTMLYNIKDLTWDDEILELLNIPKDMLPEVKSNSEIYGKTAAFHFYGGEVPISGMAGDQQAALFGQLAFEPGMVKNTYGTGSFIIMNTGDEMQLSSNNLLTTIGYGINGKVHYALEGSIFIAGSAIQWLRDGLKMIETSPESEQFALASTSDDEVYVVPAFTGLGAPYWDSNARGSVFGLTRGTSKEDFVKATLQSIAYQVRDVIDTMQVDSGIDIQQLRVDGGAAMNNMLMQFQADILGIDIARAKNLETTALGAAFLAGLAVGYWEDMDALKELNATGQLFKASMNESRKEKLYKGWKRAVKATQVFTQEEDADDDAK

SEQ ID NO: 74687 - protein, 679 aa, Streptococcus pyogenes
MSKNLLIELGLEELPAYVVTPSEKQLGERLATFLTENRLSFEDIQTFSTPRRLAVRVSGLADQQTDLTEDFKGPAKKIALDADGNFSKAAQGFVRGKGLTTDAIEFREVKGEEYVYVTKHEAGKPAKEVLLGVTEVLSAMTFPVSMHWANNSFEYIRPVHTLTVLLNDEALELDFLDIHSGRVSRGHRFLGTETTITSADSYEADLRSQFVIADAKERQEMIVEQIKTLEVEQGVQVDIDEDLLNEVLNLVEFPTAFMGSFEAKYLDVPEEVLVTSMKNHQRYFVVRDQAGHLMPNFVSVRNGNDQAIENVIKGNEKVLVARLEDGEFFWREDQKLQIADLVAKLTNVTFHEKIGSLAEHMDRTRVIAASLAKEANLSAEEVTAVDRAAQIYKFDLLTGMVGEFDELQGIMGEKYALLAGEDAAVATAIREHYLPDAAGGALPETKVGAVLALAAKLDTLLSFFSVGLIPSGSNDPYALRRATQGIVRILDHFGWRIPMDKLVDSLYDLSFDSLTYANKADVMNFIRARVDKMMGKAAPKDIREAILASSTFVVPEMLAAAEALVKASHTENYKPAVESLSRAFNLAEKADASVQVDPSLFENEQENTLFAAIQGLTLAGSAAQQLEQVFALSPVINDFFDNTMVMAGDQALKNNRLAILSDLVSKAKTIVAFNQLNTK

SEQ ID NO: 74688 - protein, 305 aa, Streptococcus pyogenes
MSKKLTFQEIILTLQQYWNDQGCMLMQAYDNEKGAGTMSPYTFLRAIGPEPWNAAYVEPSRRPADGRYGENPNRLYQHHQFQVVMKPSPSNIQELYLASLEKLGINPLEHDIRFVEDNWENPSTGSAGLGWEVWLDGMEITQFTYFQQVGGLATSPVTAEVTYGLERLASYIQEVDSVYDIEWAPGVKYGEIFLQPEYEHSKYSFEISDQDMLLENFEKFEKEASRALEEGLVHPAYDYVLKCSHTFNLLDARGAVSVTERAGYIARIRNLARVVAKTFVAERKKLGFPLLDEATRAILLAEDDE

SEQ ID NO: 74689 - protein, 382 aa, Streptococcus pyogenes
MTCYLKADCFYYPTEVRPAGYLSLHDGVFGEWTEIVPADAQIIDYTGYQIAPGLVDTHIHGYAGADVMDNSAQGIHQMSEGLLATGVTSFLPTTLTSTFEQLEKVSGTIASVADQVKGAKIQGIYFEGPYFTEEYKGAQNPSYMKTPRLEEFDAWQKAAKGLIKKIALAPERDGVKEFVSAVTKQGVTVALGHSNGTYQEAKEAVQAGASVWVHAYNGMRGLTHREPGMVGAVYNLPNTYAELICDGHHVSPIACDILMQQKGHDHVAMITDCMRAGGSPDGDYLLGEFSVVVANGTARLKESGNLAGSILKLKDGLRNVVAWGIATPAEAIHMATYVPAVSVGIDDVCGQIKAGHAADFIVLDKDLTLVATYLNGQKAFDA

SEQ ID NO: 74690 - protein, 543 aa, Streptococcus pyogenes
MSVNWQDIAFHFFGGLGLFLFSIKYMGDGLQQAAGDKLRYYIDKYTSNPFFGILVGIAMSALIQSSSGVTVITVGLVSAGLLNLRQAIGIVMGANIGTTITSFLIGFKLGDYALPMIFIGAACLFFTSNKKLNNFGRIIFGVGGIFFSLNLMGDAMDPLKSVSAFQNYLATLGDKPFQGVFIGTALTMLIQSSAAIIGILQGLFSGGLLTLQGAIPILLGSNIGTCITAVLAAIGSNIAAKRVAAAHVLFNLIGTIIFMIILVPFTSLMLWLQSKLSLTPEMTIAFSHGSFNITNTILLIPFISLLAMIVTRLIPGEDEVVKYEALYLDRLLITQAPSIALGNAHKELVHLASYAIQAFEASYSYIMTADGKFGEKVKRYERAVDTIDEELTTYLVDISNEALSPSENEVLAGILDSSRDLERIGDHSESLGILIEGIISKQIGFSISARQELTEMYQLTHCLTLDAIRAIVDSDTDLAQTIVTRHKEIEEKERRLRKTHIKRLNCGECTAQAGINFIDIISHYTRITDHALNLAEKVLSHQL

SEQ ID NO: 74691 - protein, 325 aa, Streptococcus pyogenes
MTITANKRHYLEKVSHQGIISALAFDQRGALKQMMAAHQEGEATVTQIETLKVLVSEELTPYASSILLDPEYGLLATKVRANQTGLLLAYEKTGYDATTTSRLPDCLVEWSVKRLKAAGADAIKFLLYYDVDGDEQINLQKQAYIERIGSECTAEDIPFFLELLSYDERISDNNSAAYAKLKPHKVNGAMSVFSDKRFGVDVLKVEVPVNMAYVEGFTEGEVHYSQAEAIKAFQDQEAASHLPYIYLSAGVSAKLFQETLYFAAAAGAQFSGVLCGRATWAGSVPVYITKGEDEARKWLCTEGFQNIDELNRVLEETASPWTEKI

SEQ ID NO: 74692 - protein, 171 aa, Streptococcus pyogenes
MKIAIGCDHIVTNEKMAVSDFLKSKGYDVIDCGTYDHTRTHYPIFGKKVGEAVVNGQADLGVCICGTGVGINNAVNKVPGIRSALVRDMTTALYAKEELNANVIGFGGKITGELLMCDIIDAFIKAEYKETEENKKLIAKIAHLESHHANQEDPDFFTEFLEKWDRGEYHD

SEQ ID NO: 74693 - protein, 733 aa, Streptococcus pyogenes
MSCASCALTIEKTVNQLPEVEQAVVNLATEKLTVTYQDDDLETAKVIQAVKAAGYGAQVFDEHAKHMQTGRRDEDLKVIWSQVLWSALFTIPILYLAMGHMVGLWLPPFLQPDRYPFVYSFSQLLLTIPVLVLNRHYYHNGFKALFKGHPNMDSLVALATSFAFAYSLYGVVEISLGRAHFVHSLYFESVVVILTLIGLGKYFESRSKGRTSQAIQKLLSLKATVVRVWRNSQWQLLPLEEVSYDDLVLVQPGEKVSIDGIIVEGHSSLDESFLTGESLPVEKGEKDNVFAGSLNGPGALTIKPDKLGNDTLLAQIIQLVENAQENKAPIAAIADRVSGVFVPVVLVLALLTGVFWLVFMQESLRFSLTTAIAVLVIACPCALGLATPTAIMVGTGRAAENGILFKGGDILEQAHQVDTVVFDKTGTITEGKPSLQKLLTFSGDDHLILQEAASLEAYSQHPLGEAIVRAAQEAGYDSLPVEEFESLTGLGVTGQLEGRRLAIGNAALMGILGIDLSCVQSVCAKASEKGQTLVYYAKEGQLRALFSIADAVKEDSQATVEALHQLGIHTIMLTGDHDATAKAIASQVGITDVISQVLPDQKAGVIADLRSQGRKVAMVGDGINDAPALAVADIGIAMGSGTDIAIESADVILMKPDMLDLVKAMSLSRVTMRIVKENLFWAFIYNVLMIPVAMGLLHLFGGPLLNPMLAGFAMSFSSVSVVLNALRLKGKTI

SEQ ID NO: 74694 - protein, 953 aa, Streptococcus pyogenes
MSKKRLHEIAKEIGKSSKEVVEHAKYLGLDVKSHASSVEEADAKKIISSFSKASKPDVTASQTVKPKEVAQPSVTVVKETGSEHVEKTQVSKPKSRNFKAEREARAKEQAARKQANGSSHRSQERRGGYRQPNNHQTNEQGDKRITHRSQGDTNDKRIERKASNVSPRHDNHQLVGDRNRSFAKENHKNGRFTNQKKQGRQEPQSKSPKIDFKARAAALKAEQNAEYSRQSETRFRAQQEAKRLAELARQEAKEAALKAQAEEMSHREAALKSIEEAETKLKSSNISAKSTADNRRKKQARPEKNRELTHHSQEGQKKNKKSWNSQNQVRNQKNSNWNKNKKTKKGKNVKNTNTAPKPVTERKFHELPKEFEYTEGMTVAEIAKRIKREPAEIVKKLFMMGVMATQNQSLDGDTIELLMVDYGIEAKAKVEVDDADIERFFEDENYLNPENIVERAPVVTIMGHVDHGKTTLLDTLRNSRVATGEAGGITQHIGAYQIEEAGKKITFLDTPGHAAFTSMRARGASVTDITILIVAADDGVMPQTIEAINHSKAAGVPIIVAINKIDKPGANPERVIAELAEYGIISTAWGGECEFVEISAKFNKNIDELLETVLLVAEVEELKADPTVRAIGTVIEARLDKGKGAIATLLVQQGTLHVQDPIVVGNTFGRVRAMVNDLGRRVKSAEPSTPVSITGLNETPMAGDHFAVYADEKAARAAGEERSKRALLKQRQNTQRVSLDNLFDTLKAGEIKTVNVIIKADVQGSVEALAASLVKIEVEGVRVNVVHSAVGAINESDVTLAEASNAVIIGFNVRPTPQARQQADTDDVEIRLHSIIYKVIEEVEEAMKGKLDPVYQEKILGEAIIRETFKVSKVGTIGGFMVINGKVTRDSSVRVIRDSVVIFDGKLASLKHYKDDVKEVGNAQEGGLMIENFNDLKVDDTIEAYIMEEIVRK

SEQ ID NO: 74695 - protein, 385 aa, Streptococcus pyogenes
MSKEMLEAFRILEEEKHIDKADIIDAVTESLKSAYKRRYGQSESCVIEFNEKTADFQVFTVREVVEEVFDSRLEISLKDALAISSAYELGDKIRFEESVNEFGRVAAQSAKQTIMEKMRRQMREVMFNEYKEHEGEIMTGTVERFDQRFIYVNLGSLEAQLSHQDQIPGETFKSHDRIDVYVYKVENNPKGVNVFVSRSHPEFIKRIMEQEIPEVFDGTVEIMSVSREAGDRTKVAVRSHNPNVDAIGTIVGRGGSNIKKVISKFHPKRVDAKTGLEIPVEENIDVIQWVDDPAEFIYNAIAPAEVDMVLFDDEDLKRATVVVPDSKLSLAIGRRGQNVRLAAHLTGYRIDIKSASEYDRLEAEKEAATAVEEPVVDDVMTAEEV

SEQ ID NO: 74696 - protein, 263 aa, Streptococcus pyogenes
MTTTEQELTLTPLRGKSGKAYKGTYPNGECVFIKLNTTPILPALAKEQIAPQLLWAKRMGNGDMMSAQEWLNGRTLTKEDMNSKQIIHILLRLHKSKKLVNQLLQLNYKIENPYDLLVDFEQNAPLQIQQNSYLQAIVKELKRSLPEFKSEVATIVHGDIKHSNWVITTSGMIFLVDWDSVRLTDRMYDVAYLLSHYIPRSRWSEWLSYYGYKNNDKVMQKIIWYGQFSHLTQILKCFDKRDMEHVNQEIYALRKFREIFRKK

SEQ ID NO: 74697 - protein, 241 aa, Streptococcus pyogenes
MLNIKNLTGGYHNIPVLNDVSFSVDNGELVGLIGLNGAGKSTTINEIIGFLKPYQGSISIDGLTLAENAVAYRQKIGFIPETPSLYEELTLSEHINTVAMAYDIDLEVAQKRAQPFLEMFRLTDKLEWFPVNFSKGMKQKVMIICAFVIDPSLFILDEPFLGLDPLAISDLIQTLEVEKAKGKSILMSTHVLDSAERMCDRFVILHHGQVRAQGTLADLQEAFGDRSASLNDIYLALTKED

SEQ ID NO: 74698 - protein, 424 aa, Streptococcus pyogenes
MKIGKKIVLMFTAIVLTTVLALGVYLTSAYTFSTGELSKTFKDFSTSSNKSDAIKQTRAFSILLMGVDTGSSERASKWEGNSDSMILVTVNPKTKKTTMTSLERDTLTTLSGPKNNEMNGVEAKLNAAYAAGGAQMAIMTVQDLLNITIDNYVQINMQGLIDLVNAVGGITVTNEFDFPISIAENEPEYQATVAPGTHKINGEQALVYARMRYDDPEGDYGRQKRQREVIQKVLKKILALDSISSYRKILSAVSSNMQTNIEISSRTIPSLLGYRDALRTIKTYQLKGEDATLSDGGSYQIVTSNHLLEIQNRIRTELGLHKVNQLKTNATVYENLYGSTKSQTVNNNYDSSGQAPSYSDSHSSYANYSSGVDTGQSASTDQDSTASSHRPATPSSSSDALAADESSSSGSGSLVPPANINPQT

SEQ ID NO: 74699 - protein, 270 aa, Streptococcus pyogenes
MTKKLIAIDLDGTLLHHDNTISTYTQKTIKAVQDKGHHVIISTGRPYRMALGYYLQLNLKTPIITFNGALTHMPEQKWAYEHNVTLDKGYLLRLLKYQDDFQMDFIASEYRKNVYITMTNPESIDPQLFGVDEITQDMALEITKITRNPNALLMQTHHEDKYALAKNMRACFKDEIEIDSWGGPLNILEISSKNVNKAYALNYLLGIYNMDKKDLIAFGDEHNDTEMLAFAGTGYAMKNASPVLLPYADQQLNFSNEEDGVAKKLEELFL

SEQ ID NO: 74700 - protein, 330 aa, Streptococcus pyogenes
MGIGIIIASHGKFAEGIHQSGSMIFGEQEKVQVVTFMPNEGPDDLYGHFNNAIQQFDADDEILVLADLWSGSPFNQASRVAGENPDRKMAIITGLNLPMLIQAYTERLMDAGAGVEQVAANIIKESKDGIKALPEDLNPVEETAATEKVVNALQGAIPAGTVIGDGKLKINLARVDTRLLHGQVATAWTPASKADRIIVASDEVAQDDLRKQLIKQAAPGGVKANVVPISKLIEASKDPRFGNTHALILFQTPQDALRAVEGGVEINELNVGSMAHSTGKTMVNNVLSMDKEDVATFEKLRDLGVTFDVRKVPNDSKKNLFELIQKTNIK

SEQ ID NO: 74701 - protein, 425 aa, Streptococcus pyogenes
MLDLKRIRTDFDTVAAKLKNRGVSEDTLTHLKELDEKRRALLVQSEELKAERNIASAAIAQAKRQKEDATQQIADMQKVSADIKTIDNQLVAIDQQVTDIITVLPNTPHDSVPVGADEEDNVEIRRWGTPRDFDFEVKAHWDLGEDLDILDWERGAKVTGARFLFYKNLGARLERALYNFMLDEHIKEGYQEIITPYMVNHDSMFGTGQYPKFKEDTFELADTNFVLIPTAEVPLTNYYRGEILDGKELPIYFTAMSPSFRSEAGSAGRDTRGLIRLHQFHKVEMVKFAKPEESYQELEKMTANAENILQKLGLPYRVISLCTGDMGFSAAKTYDLEVWIPAQNTYREISSCSNTEDFQARRAQIRYRDEADGKVKLLHTLNGSGLAVGRTVAAILENYQNEDGSVTIPEVLRPYMGGETVISPK

SEQ ID NO: 74702 - protein, 256 aa, Streptococcus pyogenes
MTDVSRILKEARDQGRLTTLDYANLIFDDFMELHGDRHFSDDGAIVGGLAYLAGQPVTVIGIQKGKNLQDNLARNFGQPNPEGYRKALRLMKQAEKFGRPVVTFINTAGAYPGVGAEERGQGEAIAKNLMEMSDLKVPIIAIIIGEGGSGGALALAVADQVWMLENTMYAVLSPEGFASILWKDGSRATEAAELMKITAGELYKMGIVDRIIPEHGYFSSEIVDIIKANLIEQITSLQAKPLDQLLDERYQRFRKY

SEQ ID NO: 74703 - protein, 288 aa, Streptococcus pyogenes
MALFRKKDKYIRITPNNSLKGSVSHNVPEVPDELFAKCPACKHMIYKKDLGLAKICPTCSYNFRISAQERLTLTVDEGSFQELFTSIETKDPLRFPGYQEKLQKAKETTGLHEAVLTGKAMVKEQKIALAIMDSHFIMASMGTVVGEKITRLFELAIEENLPVVIFTASGGARMQEGIMSLMQMAKVSAAVKRHSNAGLFYLTILTDPTTGGVTASFAMEGDIILAEPQSLVGFAGRRVIETTVRENLPDDFQKAEFLQDHGFVDAIVKRTELRDKIAHLVAFHGGGQ

SEQ ID NO: 74704 - protein, 454 aa, Streptococcus pyogenes
MFKKILIANRGEIAVRIIRAARELGISTVAVYSEADKEALHTILADEAICIGPARSKESYLNMNSVLSAAIVTGAQAIHPGFGFLSENSKFATMCEEMNIKFIGPSASVMDKMGDKINARSEMIKAGVPVIPGSDGEVYNAQEALAIANKIGYPVMLKASAGGGGKGIRKVETEADLEAAFNAASQEALGAFGNGAMYLEKVIYPARHIEVQILGDAYGNIIHLGERDCSLQRNNQKVLEESPSIAIGNTLRHEMGQAAVRAAEAVAYENAGTIEFLLDEDSEKFYFMEMNTRIQVEHPVTEFVTGVDIVKEQIKIAAGQPLAINQEDITITGHAIECRINAENTAFNFAPSPGKITDLYMPSGGVGLRVDSAVYNGYAIPPYYDSMIAKIIVHGSNRFDALMKMQRALVELEIEGIITNTDFQLDLISDKRVIAGDYDTSFLMETFLPHYNKD

SEQ ID NO: 74705 - protein, 139 aa, Streptococcus pyogenes
MDIREIQAALPHRYPMLLVDRVLEVSDDHIVAIKNVTINEPFFNGHFPHYPVMPGVLIMEALAQTAGVLELSKEENKGKLVFYAGMDKVKFKKQVVPGDQLVMTATFIKRRGTIAVVEARAEVDGKLAASGTLTFACGQ

SEQ ID NO: 74706 - protein, 166 aa, Streptococcus pyogenes
MNIQEIKDLMAQFDTSSLREFLFKTNEGELIFSKNEQHLNASTSNQEHAVPVPQVQLVPNPTASEASSPASVKDVPVEEQPQAESFVAEGDIVESPLVGVAYLAASPDKPPFVAVGDTVKKGQTLVIIEAMKVMNEVPAPCDGVITEILVSNEDVIEFGQGLVRIK

SEQ ID NO: 74707 - protein, 410 aa, Streptococcus pyogenes
MTFKRVVVTGYGLTSPIGHDPETFWNNLKAGQIGIGPITKFDTTDYAVKNAAEIQDFPFDKYFVKKDLNRFDRYSLYALYAAKEAINHADLNIEMVDSDRFGVIVASGIGGIAEIEEQVIRLHEKGPKRVKPMTLPKALPNMAAGNVAMSLKAQGVCKSINTACASSNDAIGDAFRAIKFGTQDVMIVGGSEAAITKFAIAGFQSLTALSTTEDPSRSSIPFDKDRNGFIMGEGSGMLVLESLEHAQERGATILAEIVGYGNTCDAYHMTSPNPEGLGARKAIHLALQEAGIEASAINYVNAHGTSTPANEKGESQAIVAVLGKDVPVSSTKSFTGHLLGAAGAIEAIATIEAMRHNYVPMTAGTQALSEDIEANVIFGEGKETAINYAISNTFGFGGHNAVLAFKCWEE

SEQ ID NO: 74708 - protein, 244 aa, Streptococcus pyogenes
MEIKGKNIFITGSTRGIGLAMAHQFASLEANIVLNGRSAISEELVASFTDYGVTVVTISGDVSEASEAKRMVNEAIESLGSIDVLVNNAGITNDKLMLKMTEEDFERVLKINLTGAFNMTQSVLKPMIKARQGAIINVSSVVGLTGNIGQANYAASKAGMIGFTKSVAREVAARNICVNAIAPGFIESDMTGVLPEKMQEQILSQIPMKRIGKAQEVAHLASFLVEQDYITGQVIAIDGGMTMQ

SEQ ID NO: 74709 - protein, 312 aa, Streptococcus pyogenes
MTKTAFLFAGQGAQKLGMARDFYDNFAIVRKTFDQASQVLGYDLRRLIDSDELKLNQTSYTQPAILTSSIAIYRVLGLHHVKPDMVAGLSLGEYSALVASGALSFEDTLSLVAKRGRLMEEAAPQGSGKMVAVMNTDVQVIEEVCQIAAKHGVVAPANYNTPSQIVIGGQTDAVNVAVELLKERGVKRLIPLNVSGPFHTALLEPASRLLAKELERYNFSDFKIPLVGNTEANIMEKDRIPELLARQVMEPVRFYDSVATLVESGITQFIEVGPGKVLTGFVKKIDKNLLCTSVENMVSLRLFLDREDIHGN

SEQ ID NO: 74710 - protein, 323 aa, Streptococcus pyogenes
MKTRITELLNIDYPIFQGGMAWVADGDLAGAVSNAGGLGIIGGGNAPKEVVKANIDRVKAITDRPFGVNIMLLSPFADDIVDLVIEEGVKVVTTGAGNPGKYMERLHQAGIIVVPVVPSVALAKRMEKLGVDAVIAEGMEAGGHIGKLTTMSLVRQVVEAVSIPVIAAGGIADGHGAAAAFMLGAEAVQIGTRFVVAKESNAHQNFKDKILAAKDIDTVISAQVVGHPVRSIKNKLTSAYAKAEKAFLIGQKTATDIEEMGAGSLRHAVIEGDVVNGSVMAGQIAGLVRKEESCETILKDIYYGAARVIQNEAKRWQSVSIEK

SEQ ID NO: 74711 - protein, 74 aa, Streptococcus pyogenes
MAVFEKVQEIIVEELGKETEEVTLETTFDDLDADSLDVFQVISEIEDAFDIQIETEEGLNTVGDLVAYVEEKSK

SEQ ID NO: 74712 - protein, 324 aa, Streptococcus pyogenes
MIFSKISQVAHYVPQQLVTNNDLASIMDTSHEWIFSRTGIAERHISRDEMTSDLAIQVADQLLTQSGLKADAIDFIIVATISPDATMPSTAAKVQAAIAATSAFAFDMTAACSGFVFALAMADKLIASGAYQNGMVIGAETLSKLVNWQDRATAVLFGDGAGGVLLEASKDKHVLAETLHTDGARCQSLISGETSLSSPYSIGKKAIATIQMDGRAIFDFAIRDVSKSILTLMAQSDITKDDIDYCLLHQANRRILDKIARKIDVPREKFLENMMRYGNTSAASIPILLSEAVQKGQIRLDGTQKILLSGFGGGLTWGSLIVRI

SEQ ID NO: 74713 - protein, 263 aa, Streptococcus pyogenes
MQFKHIIFDVVDDLATLTLNRPEVSNGFNIPICQEILVALAEVKRDTSVRFLLIKAVGKVFSVGGDLVEMQEAVAKDNVQSLVKIAELVQEISFAIKHLPKPVILCADGAVAGAAFNIALAVDFCIASTQTKFIQAFVNVGLAPDAGGLFLLTRAVGLNRATHLVMTGEGITADKGLDYGFVYRTAESDKLDKVCLQLLKRLRRGSSNSYAGMKSLVWQSFFTGWEDYAKAELAIQEELAFKEDFKEGVIAFGERRRPNFQGK

SEQ ID NO: 74714 - protein, 608 aa, Streptococcus pyogenes
MSKIIGIDLGTTNSAVAVLEGTESKIIANPEGNRTTPSVVSFKNGEIIVGDAAKRQAVTNPETVISIKSKMGTSEKVSANGKEYTPQEISAMILQYLKGYAEDYLGEKVEKAVITVPAYFNDAQRQATKDAGKIAGLEVERIVNEPTAAALAYGMDKTDKDEKILVFDLGGGTFDVSILELGDGVFDVLATAGDNKLGGDDFDQKIIDFLVAEFKKENGIDLSQDKMALQRLKDAAEKAKKDLSGVTQTQISLPFITAGSAGPLHLEMSLSRAKFDDLTRDLVERTKTPVRQALSDAGLSLSEIDEVILVGGSTRIPAVVEAVKAETGKEPNKSVNPDEVVAMGAAIQGGVITGDVKDVVLLDVTPLSLGIETMGGVFTKLIDRNTTIPTSKSQVFSTAADNQPAVDIHVLQGERPMAADNKTLGRFQLTDIPAAPRGIPQIEVTFDIDKNGIVSVKAKDLGTQKEQHIVIKSNDGLSEEEIDRMMKDAEANAEADAKRKEEVDLKNEVDQAIFATEKTIKETEGKGFDTERDAAQSALDELKAAQESGNLDDMKAKLEALNEKAQALAVKMYEQAAAAQQAAQGAEGAQANDSANNDDVVDGEFTEK

SEQ ID NO: 74715 - protein, 235 aa, Streptococcus pyogenes
MTKTRLYIARHGKTMFNTIGRAQGWSDTPLTKKGEEGIRELGLGLKDATIPFKAAFSSDSGRTMQTIEIILRESENEFLPYTKDNRIREWCFGSLEGTYDSELFLGVLPRTKAFENRDNLRDVPYSELAESIVEVDTANWAEPWEVLRKRIWEGFEAIALSIQNAGGGNALVVSHGMTIGTFLWLIDPDRDKQYIDNGSVTVVEFDDGQFTIKTIGDMSYRYRGREIIEERSDEI

SEQ ID NO: 74716 - protein, 479 aa, Streptococcus pyogenes
MNFETIIGLEVHVELNTNSKIFSPSSAHFGEDPNANTNVIDWSFPGVLPVMNKGVIDAGIKAALALNMDIHKEMHFDRKNYFYPDNPKAYQISQFDEPIGYNGWIDIKLEDGSTKKIRIERAHLEEDAGKNTHGTDGYSYVDLNRQGVPLIEIVSEADMRSPEEAYAYLTALKEIIQYTGISDVKMEEGSMRVDANISLRPYGQEQFGTKTELKNLNSFSNVRKGLEFEVERQAKLLRSGGVIRQETRRYDEANKGTILMRVKEGAADYRYFPEPDLPLYEIDDAWIDEMRAQLPQFPAQRRAKYEEELGLSAYDASQLTATKVLSDFFETAVSLGGDAKQVSNWLQGEVAQFLNAEGKTIEEIALTPENLVEMIAIIADGTISSKMAKKVFVHLAKNGGSARAYVEKAGLVQISDPAVLVPIIHQVFADNEAAVADFKSGKRNADKAFTGFLMKATKGQANPQVAQQLLAQELQKLRD

SEQ ID NO: 74717 - protein, 488 aa, Streptococcus pyogenes
MSFNHKTIEELHDLLVAKEISATELTQATLEDIKSREEAVGSFITVSEEVALKQAAAIDAKGIDADNLMSGIPLAVKDNISTKEILTTAASKMLYNYEPIFNATSVANAYAKDMIVIGKTNMDEFAMGGSTETSYFKKTKNAWDHTKVPGGSSGGSATAVASGQVRLSLGSDTGGSIRQPAAFNSVVGLKPTYGTVSRYGLIAFGSSLDQIGPFAPTVKENAQLLNVIASSDVKDATSAPVRIADYTSKIGRDIKGMKIALPKEYLGEGIDPEIKETVLASVKQFEALGATVEEVSLPHSKYGVAVYYIIASSEASSNLQRFDGIRYGFRADDAKNLDEIYVNTRSQGFGDEVKRRIMLGTFSLSSGYYDAYFKKAGQVRTLIIQDFDKVFADYDLILGPTTPTVAFGLDTLNHDPVAMYLADLLTIPVNLAGLPGISIPAGFVDGLPVGLQLIGPKYAEETIYQAAAAFEAVTDYHKQQPIIFGGDK

SEQ ID NO: 74718 - protein, 100 aa, Streptococcus pyogenes
MKISEEEVRHVAKLSKLSFSESETTTFATTLSKIVDMVELLNEVDTEGVAITTTMADKKNVMRQDVAEEGTDRALLFKNVPEKENHFIKVPAILDDGGDA

SEQ ID NO: 74719 - protein, 340 aa, Streptococcus pyogenes
MTASDLQRDQSLLAKKRFRSGLYLVLLILSLLFLAVIALSLGGLAVSYGAIVKGLFVAYDPQVALIYDLRFPRIVIALLAGAGIAVSGVLFQAVLKNPISDPAIIGICSGASFMVLVSSLLLPQLLLYGPIVSFLGGGVSFLLIYGLAWKKGLNPIRLILTGIAINALFMGLSTALTSFFTSASPMVNALLAGHISQKTWADVGVLFPYTFIGLLLALLLSKTCNLLLLDDQVIRHLGIDATALRLGISLVAVLLASVATSIVGVVSFLGLIVPHMSRLLVGSKHQILIPFSALLGAFVFLLADTLGRSLAYPLEISPAIIMSIVGGPYFIYLLRRSDII

SEQ ID NO: 74720 - protein, 294 aa, Streptococcus pyogenes
MIKRCKGIGLALMAFFLVACVNQHPKTAKETEQQRIVATSVAVVDICDRLNLDLVGVCDSKLYTLPKRYDAVKRVGLPMNPDIELIASLKPTWILSPNSLQEDLEPKYQKLDTEYGFLNLRSVEGMYQSIDDLGNLFQRQQEAKELRQQYQDYYRAFQAKRKGKKKPKVLILMGLPGSYLVATNQSYVGNLLDLAGGENVYQSDEKEFLSANPEDMLAKEPDLILRTAHAIPDKVKVMFDKEFAENDIWKHFTAVKEGKVYDLDNTLFGMSAKLNYPEALDTLTQLFDHVGDHP

SEQ ID NO: 74721 - protein, 366 aa, Streptococcus pyogenes
MISSFHRPTVARVNLQAIKENVASVQKHIPLGVKTYAVVKADAYGHGAVQVSKALLPQVDGYCVSNLDEALQLRQAGIDKEILILGVLLPNELELAVANAITVTIASLDWIALARLEKKECQGLKVHVKVDSGMGRIGLRSSKEVNLLIDSLKELGADVEGIFTHFATADEADDTKFNQQLQFFKKLIAGLEDKPRLVHASNSATSIWHSDTIFNAVRLGIVSYGLNPSGSDLSLPFPLQEALSLESSLVHVKMISAGDTVGYGATYTAKKSEYVGTVPIGYADGWTRNMQGFSVLVDGQFCEIIGRVSMDQLTIRLPKAYPLGTKVTLIGSNQQKNISTTDIANYRNTINYEVLCLLSDRIPRIY

SEQ ID NO: 74722 - protein, 118 aa, Streptococcus pyogenes
MIVGHGIDLQEISAIEKVYQRNPRFAQKILTEQELAIFESFPYKRRLNYLAGRWSGKEAFAKAIGTGIGRLTFQDIEILNDVRGCPILTKSPFKGNSFISISHSGNYVQASVILEDKK

SEQ ID NO: 74723 - protein, 839 aa, Streptococcus pyogenes
MANILRKVIENDKGELRKLEKIAKKVESYADQMASLSDRDLQGKTLEFKERYQKGETLEQLLPEAFAVVREAAKRVLGLFPYRVQIMGGIVLHNGDVPEMRTGEGKTLTATMPVYLNAIAGEGVHVITVNEYLSTRDATEMGEVYSWLGLSVGINLAAKSPAEKREAYNCDITYSTNSEVGFDYLRDNMVVRQEDMVQRPLNFALVDEVDSVLIDEARTPLIVSGAVSSETNQLYIRADMFVKTLTSVDYVIDVPTKTIGLSDSGIDKAESYFNLSNLYDIENVALTHFIDNALRANYIMLLDIDYVVSEDGEILIVDQFTGRTMEGRRFSDGLHQAIEAKEGVRIQEESKTSASITYQNMFRMYKKLAGMTGTAKTEEEEFREVYNMRIIPIPTNRPIARIDHTDLLYPTLESKFRAVVEDVKTRHAKGQPILVGTVAVETSDLISRKLVEAGIPHEVLNAKNHFKEAQIIMNAGQRGAVTIATNMAGRGTDIKLGEGVRELGGLCVIGTERHESRRIDNQLRGRSGRQGDPGESQFYLSLEDDLMRRFGSDRIKAFLDRMKLDEEDTVIKSGMLGRQVESAQKRVEGNNYDTRKQVLQYDDVMREQREIIYANRRDVITANRDLGPEIKAMIKRTIDRAVDAHARSNRKDAIDAIVTFARTSLVPEEFISAKELRGLKDDQIKEKLYQRALAIYDQQLSKLRDQEAIIEFQKVLILMIVDNKWTEHIDALDQLRNAVGLRGYAQNNPVVEYQAEGFKMFQDMIGAIEFDVTRTMMKAQIHEQERERASQRATTAAPQNIQSQQSANTDDLPKVERNEACPCGSGKKFKNCHGRKSFS

SEQ ID NO: 74724 - protein, 317 aa, Streptococcus pyogenes
MSEPLFLKSTMHDRIWGGTKLRDVFAYNIPSDTTGEYWAISAHPNGVSTVTNGRYQGQPLNTLYAQEPALFGNPKEEVFPLLTKILDANDWLSVQVHPDDAYGREHEGELGKTECWYIISAEEGSEIVYGHQAKSKEDLRAMIEAGAWDDLLTRVPVKAGDFFYVPSGTMHAIGKGILILETQQSSDTTYRVYDFDRKDVNGNLRDLHIEKSIDVLTIGKPENSVPATMVLDNMVATTLVSTPFFTVYKWVTSQMVDMKQAAPYLLVSVLKGQGKLYVDQKAYELEKGMHFILPNDVKSWSFDGQLEMIVSHPNQLV

SEQ ID NO: 74725 - protein, 150 aa, Streptococcus pyogenes
MTNSFQNSRRDLRERAFQALFNIEMGAELLAASQFAYGYDKVTGEDAQVLELPIFLLSLVTGVNNHKEELDNLISTHLKKGWSLERLTLTDKTLLRLGLFEIKYFDKTPDRVALNEIIEVVKKYSDETSAKFINGLLSQYVSGAPSANKS

SEQ ID NO: 74726 - protein, 942 aa, Streptococcus pyogenes
MQNKIIIHGARAHNLKNIDVEIPRDKLVVVTGLSGSGKSSLAFDTIYAEGQRRYVESLSAYARQFLGNMEKPDVDSIDGLSPAISIDQKTTSKNPRSTVGTVTEINDYLRLLYARVGTPYCINGHGAITASSAEQIVEQVLALPERTRMQILAPVVRRKKGQHKTVFEKIQKDGYVRVRVDGDIFDVTEVPELSKSKMHNIEVVIDRLVNKDGIRSRLFDSVEAALRLGDGYLMIDTMDGNELLFSEHYSCPVCGFTVPELEPRLFSFNAPFGSCPTCDGLGIKLEVDLDLVVPDPSKSLREGALAPWNPISSNYYPTMLEQAMASFGVDMDTPFEALTEEERDLVLYGSGDREFHFHYVNDFGGERNIDIPFEGVVTNVNRRYHETNSDYTRNVMRGYMNELTCATCHGYRLNDQALCVHVGGEEGTHIGQISELSIADHLQLLEELELTENESTIAKPIVKEIHDRLTFLNNVGLNYLTLSRAAGTLSGGESQRIRLATQIGSNLSGVLYILDEPSIGLHQRDNDRLIESLKKMRDLGNTLIVVEHDEDTMMQADWLIDVGPGAGEFGGEITASGTPKQVAKNKKSITGQYLSGKKFIPVPLERRSGNGRFIEIKGAAQNNLQSLDVRFPLGKFIAVTGVSGSGKSTLVNSILKKAVAQKLNRNADKPGKYHSISGIEHIERLIDIDQSPIGRTPRSNPATYTGVFDDIRDLFAQTNEAKIRGYKKGRFSFNVKGGRCEACSGDGIIKIEMHFLPDVYVPCEVCHGRRYNSETLEVHYKGKNIAEVLDMTVDDALVFFSAIPKIARKIQTIKDVGLGYVTLGQPATTLSGGEAQRMKLASELHKRSTGKSLYILDEPTTGLHTDDIARLLKVLERFVDDGNTVLVIEHNLDVIKSADHIIDLGPEGGDGGGQIVATGTPEEVAQVKESYTGHYLKVKLQQ

SEQ ID NO: 74727 - protein, 79 aa, Streptococcus pyogenes
MAQQRRGGFKRRKKVDFIAANKIEYVDYKDTELLSRFVSERGKILPRRVTGTSAKNQRKVTTAIKRARVMALMPYVNED

SEQ ID NO: 74728 - protein, 163 aa, Streptococcus pyogenes
MINNVVLVGRMTKDAELRYTPSQVAVATFTLAVNRTFKSQNGEREADFINCVIWRQPAENLANWAKKGALIGVTGRIQTRNYENQQGQRVYVTEVVADNFQMLESRATREGGSTGSFNGGFNNNTSSSNSYSAPAQQTPNFGRDDSPFGNSNPMDISDDDLPF

SEQ ID NO: 74729 - protein, 96 aa, Streptococcus pyogenes
MAKYEILYIIRPNIEEEAKNALVARFDSILTDNGATVVESKDWEKRRLAYEINDFREGLYHIVNLEATDAAALNEFDRLSKINGDILRHMIVKLDA

SEQ ID NO: 74730 - protein, 779 aa, Streptococcus pyogenes
MNNKILEQLEFNKVKELLLPYLKTEQSQEELLELEPMTEAPKIEKSFNEISDMEQIFVEHHSFGIVSLSSISESLKRLELSTDLNIQELLAIKKVLQSSSDMIHFYSDLDNVSFQSLDRLFENLEQFPNLQGSFQAINDGGFLEHFASPELERIRRQLTNSERRVRQILQDMLKEKAELLSENLIASRSGRSVLPVKNTYRNRISGVVHDISSSGSTVYIEPRAVVTLNEEITQLRADERHEEGRILHAFSDLLRPHVATIRNNAWILGHLDFVRAKYLFMSDNKATIPKISNDSTLALINVRHPLLSNPVANDLHFDHDLTAIVITGPNTGGKTIMLKTLGLAQLMGQSGLPVLADKGSKIAVFNNIFADIGDEQSIEQSLSTFSSHMTHIVSILNEADHNSLVLFDELGAGTDPQEGASLAMAILEHLRLSHIKTMATTHYPELKAYGIETNFVENASMEFDAETLSPTYRFMQGVPGRSNAFEIASRLGLAPFIVKQAKQMTDSDSDVNRIIEQLEAQTLETRRRLDHIKEVEQENLKFNRAVKKLYNEFSHERDKELEKIYQEAQEIVDMALNESDTILKKLNDKSQLKPHEIIDAKAQIKKLAPQVDLSKNKVLNKAKKIKAARAPRIGDDIIVTSYGQRGTLTSQLKDGRWEAQVGIIKMTLTQDEFSLVRVQEEQKVKNKQINVVKKADGSGPRARLDLRGKRYEEAMQELDHFIDQALLNNMGQVDIIHGIGTGVIREGVTKYLRRNKHVKHFAYAPQNAGGSGATIVTLG

SEQ ID NO: 74731 - protein, 197 aa, Streptococcus pyogenes
MKQFIKEWGPFTLFLILFGLSRLFLWQAVKVDGHSMDPTLAHGERLIVFNQARIDRFDIVVAQEEENGQKKEIVKRVIGLPGDTISYNDDTLYINGKKTVEPYLAEYLKQFKNDKLQKTYAYNTLFQQLAETSDAFTTNSEGQTRFEMSVPKGEYLLLGDDRIVSRDSREVGSFKKENLIGEVKARFWPLNKMTVFN

SEQ ID NO: 74732 - protein, 817 aa, Streptococcus pyogenes
MEYVFTGTVDRIIFENQANFFKILLLAIEDTDSDIDDFEIIITGTMADIIEGDDYTFWGELTQHPKYGQQLKLSRYQKIKPSSSGLVNYFSSDHFKGIGKKTAEKIIALYGHNTIDHILEDPSKLETISGLSKANRQAFVAKLKLNYGTEQLIAGLVELGLSNRFALQAFEKYKEEALDLVKENPYQLVEDLQGFGFKMADALAENLGIESDSPKRFRAALLHCLLEESINRGDTYVQARQLLDFAITLLEDARQVECDPAAVAEQLSELIIEGKIKNSDTKLFDASLYFAEEGIANNISRLLDTPLSQSFSHDTIQTTIQAVQKDFAITYDQVQQEAITKALTSKVFLLTGGPGTGKTTVIRGILQAYANLHQIDLDKKDLPILLAAPTGRAARRMNELTGLPSATIHRHLGLNGDNDYQAMEDYLDCDLLIVDEFSMVDTWLANQLLGAINSTTQVIIVGDSDQLPSVGPGQVLSDLLKVNSLPQIALQKIFRQSQESTIVNLADQMRRGILAADFRDKKADRSYFEAQAAFIPDMIQKIVLSAIKSGIPAEEIQILAPMYKGQAGINHLNQLMQELLNPLQGQTEFLFNDTHFRKGDKVLHLVNDAQLNVFNGDIGYITDLIPAKYTESKQDELILDFDGSEVTYPRNEWLKLTLAYAMSIHKSQGSEFQVVILPITRQSGRLLQRNVIYTAITRSKSKLILLGEYTAFEYAIKHEGDKRQTYLIERFQEQSDLASSQPNQELKSKEQTSLFSNTATLEDDSQKSSSQSTNSNPTENSQSDNDDFRLTPENYSTIDSMIGLTESDIALFFQKKS

SEQ ID NO: 74733 - protein, 99 aa, Streptococcus pyogenes
MMNMQNMMKQAQKLQKQMEQKQADLAAMQFTGKSAQDLVTATFTGDKKLVGIDFKEAVVDPEDVETLQDMTTQAINDALTQIDETTKKTLGAFAGKLPF

SEQ ID NO: 74734 - protein, 389 aa, Streptococcus pyogenes
MTQYDTIIIGGGPAGMMAAISSSYYGYKTLLIEKNRRLGKKLAGTGGGRCNVTNSGNLDVLMAGIPGNGRFLYSVFSQFDNHDIIAFFEENGVKLKEEDHGRMFPTTDKSRTIIDALEKKIKALGGQVLTSTEVVSVKKQDDLFYLKSADQTFTCQKLIVTTGGKSYPSTGSTGFGHDIARHFKLTVTDLEAAESPLLTDFPHKVLQGISLDDVTLSYDKHVITHDLLFTHFGLSGPAALRLSSFVKGGEIAELDFLPHLSTDDLTAYLSDQRDKNIKNALKGLLPERVADFLSEDYPEKVKQLSPKQEKELLDKLKHLQIPITGKMSLAKSFVTKGGVDLKEINPKTLESKKVPGLYFAGEVLDINAHTGGFNITSALCSGWIAGKSS

SEQ ID NO: 74735 - protein, 223 aa, Streptococcus pyogenes
MEVKDILKTVDHTLLATTATWPEIQTILDDAMAYETASACIPASYVKKAAEYVSGKLAICTVIGFPNGYSTTAAKVFECQDAIQNGADEIDMVINLTDVKNGDFDTVEEEIRQIKAKCQDHILKVIVETCQLTKEELIELCGVVTRSGADFIKTSTGFSTAGATFEDVEVMAKYVGEGVKIKAAGGISSLEDAKTFIALGASRLGTSRIIKIVKNEATKTDSY

SEQ ID NO: 74736 - protein, 89 aa, Streptococcus pyogenes
MAKKSKIAKYQKQLQLIEQYADLRRDLKAKGDYESLRKLPRDSNPNRLKNRDKIDGRPHAYMRKFGVSRINFRDLAHKGQLPGVTKASW

SEQ ID NO: 74737 - protein, 342 aa, Streptococcus pyogenes
MTDRYILAVESSCDETSVAILKNESTLLSNVIASQVESHKRFGGVVPEVASRHHVEVITTCFEDALQEAGISASDLSAVAVTYGPGLVGALLVGLAAAKAFAWANHLPLIPVNHMAGHLMAAREQKPLVYPLIALLVSGGHTELVYVPEPGDYHIIGETRDDAVGEAYDKVGRVMGLTYPAGREIDQLAHKGQDTYHFPRAMITEDHLEFSFSGLKSAFINLHHNAKQKGDELILEDLCASFQAAVLDILLAKTKKALSRYPAKMLVVAGGVAANQGLRDRLAQEITHIEVVIPKLRLCGDNAGMIALAAAIEYDKQHFANMSLNAKPSLAFDQFPDSFVIN

SEQ ID NO: 74738 - protein, 560 aa, Streptococcus pyogenes
MTNISLKPNEVGVFAIGGLGEIGKNTYGIEYQDEIIIVDAGIKFPEDDLLGIDYVIPDYSYIVDNLDRVKALVITHGHEDHIGGIPFLLKQANIPIYAGPLALALIRGKLEEHGLWREATVYEINHNTELTFKNMSVTFFKTTHSIPEPVGIVIHTPQGKIICTGDFKFDFTPVGDPADLQRMAALGEEGVLCLLSDSTNAEIPTFTNSEKVVGQSILKIIEGIHGRIIFASFASNIYRLQQAAEAAVKTGRKIAVFGRSMEKAIVNGIELGYIKVPKGTFIEPSELKNLHASEVLIMCTGSQGESMAALARIANGTHRQVTLQPGDTVIFSSSPIPGNTTSVNKLINTIQEAGVDVIHGKVNNIHTSGHGGQQEQKLMLSLIKPKYFMPVHGEYRMQKVHAGLAMDIGIPKENIFIMENGDVLALTSDSARIAGHFNAQDIYVDGNGIGDIGAAVLRDRRDLSEDGVVLAVATVDFNTQMILAGPDILSRGFIYMRESGDLIRESQRVLFNAIRIALKNKDASIQSVNGAIVNALRPFLYEKTEREPIIIPMVLTPDKH

SEQ ID NO: 74739 - protein, 448 aa, Streptococcus pyogenes
MAITVADIRREVKEKNVTFLRLMFTDIMGVMKNVEIPATKEQLDKVLSNKVMFDGSSIEGFVRINESDMYLYPDLDTWIVFPWGDENGAVAGLICDIYTAEGKPFAGDPRGNLKRALKHMNEIGYKSFNLGPEPEFFLFKMDDKGNPTLEVNDNGGYFDLAPIDLADNTRREIVNILTKMGFEVEASHHEVAVGQHEIDFKYADVLKACDNIQIFKLVVKTIAREHGLYATFMAKPKFGIAGSGMHCNMSLFDNQGNNAFYDEADKRGMQLSEDAYYFLGGLMKHAYNYTAITNPTVNSYKRLVPGYEAPVYVAWAGSNRSPLIRVPASRGMGTRLELRSVDPTANPYLALAVLLEAGLDGIINKIEAPEPVEANIYTMTMEERNEAGIIDLPSTLHNALKALQKDDVVQKALGYHIYTNFLEAKRIEWSSYATFVSQWEIDHYIHNY

SEQ ID NO: 74740 - protein, 398 aa, Streptococcus pyogenes
MAKLTVKDVDLKGKKVLVRVDFNVPLKDGVITNDNRITAALPTIKYIIEQGGRAILFSHLGRVKEEADKEGKSLAPVAADLAAKLGQDVVFPGVTRGSKLEEAINALEDGQVLLVENTRFEDVDGKKESKNDEELGKYWASLGDGIFVNDAFGTAHRAHASNVGISANVEKAVAGFLLENEIAYIQEAVETPERPFVAILGGSKVSDKIGVIENLLEKADKVLIGGGMTYTFYKAQGIEIGNSLVEEDKLDVAKDLLEKSNGKLILPVDSKEANAFAGYTEVRDTEGEAVSEGFLGLDIGPKSIAEFDQALTGAKTVVWNGPMGVFENPDFQAGTIGVMDAIVKQPGVKSIIGGGDSAAAAINLGRADKFSWISTGGGASMELLEGKVLPGLAALTEK

SEQ ID NO: 74741 - protein, 296 aa, Streptococcus pyogenes
MLGPFIFIAFGVIVILAIVASTLYVVRQQSVAIVERFGRYQKTATSGIHIRLPFGIDKIAARVQLRLLQSEIIVETKTKDNVFVTLNVATQYRVNEQNVTDAYYKLMKPESQIKSYIEDALRSSVPKLTLDELFEKKDEIALEVQHQVAEEMSTYGYIIVKTLITKVEPDAEVKQSMNEINAAQRKRVAAQELANADKIKIVTAAEAEAEKDRLHGVGIAQQRKAIVDGLAESIQELKEANISLNEEQIMSILLTNQYLDTLNTFAAKGNQTLFLPNTPSGVEDIRTQVLSALKTK

SEQ ID NO: 74742 - protein, 62 aa, Streptococcus pyogenes
MAKVCYFTGRKTVSGNNRSHAMNQTKRTVKPNLQKVTILVDGKPKKVWASARALKSGKVERI

SEQ ID NO: 74743 - protein, 293 aa, Streptococcus pyogenes
MAIVSAEKFVQAARENGYAVGGFNTNNLEWTQAILRAAEAKQAPVLIQTSMGAAKYMGGYKVCQSLITNLVESMGITVPVAIHLDHGHYEDALECIEVGYTSIMFDGSHLPVEENLAKTAEVVKIAHAKGVSVEAEVGTIGGEEDGIIGKGELAPIEDAKAMVETGIDFLAAGIGNIHGPYPENWEGLALDHLEKLTAAVPGFPIVLHGGSGIPDDQIKEAIRLGVAKVNVNTESQIAFSNATREFARNYEANEAEYDGKKLFDPRKFLAPGMKAVQGAVEERIDVFGSANKA

SEQ ID NO: 74744 - protein, 534 aa, Streptococcus pyogenes
MTKYIFVTGGVVSSIGKGIVAASLGRLLKNRGLKVTIQKFDPYINIDPGTMSPYQHGEVYVTDDGAETDLDLGHYERFIDINLNKYSNVTTGKIYSEVLRKERKGEYLGATVQVIPHITDALKEKIKRAASTTDSDVIITEVGGTVGDIESLPFLEALRQMKADVGSENVMYIHTTLLPYLKAAGEMKTKPTQHSVKELRGLGIQPNMLVIRTEEPVEQGIKNKLAQFCDVNSEAVIESRDVEHLYQIPLNLQAQSMDQIVCDHLKLNAPQADMTEWSAMVDKVMNLRKTTKIALVGKYVELPDAYLSVVEALKHSGYANDTAIDLKWVNANDVTVDNAADLLGDADGIIVPGGFGQRGTEGKIQAIRYARENDVPMLGICLGMQLTCVEFARHVLNMEGANSFELEPSTKYPIIDIMRDQIDIEDMGGTLRLGLYPCKLKPGSKAAMAYNNQEVVQRRHRHRYEFNNKFRPEFEAAGFVFSGVSPDNRLVEIVELKEKKFFVAAQYHPELQSRPNRPEELYTAFVTAAIKNSN

SEQ ID NO: 74745 - protein, 281 aa, Streptococcus pyogenes
MTFILHYLEQSHIENIGLTIFKKLVSLIILLLFFAILKRVTNYLFEKTINKSFAYSRQSEARKKTLSKLTHNILNYLLYFLLIYWILSLFGIPVSSLLAGAGIAGVAIGLGAQGFLSDVVNGFFILFENQFEVGDNVTISDIEGSVFGVGIRTTQIRGFDGTLHFIPNRSITVVSNKSRGNMRALIEIPLYSTVNLSQVTRIIDEVNQKELPNHPQIVGKPNILGPQNNSNGQFTFRIAIFTENGEQFKIYHTFYRLYQEALLKEGIQLPTAISYSITSKS

SEQ ID NO: 74746 - protein, 249 aa, Streptococcus pyogenes
MVRYKATISYDGTLFSGFQRQRHLRTVQEEIEKTLYKLNNGTKIIIHGAGRTDAGVHAYGQVIHFDLPQEQEVEKLRFALDTQTPEDIDVVNIEKVADDFHCRYQKHLKTYEFLVDNGRPKNPMMRHYTTHYPYTLNIKLMQEAINGLVGTHDFTGFTAAGTSVQNKVRTITKATVSRDEKTDFLVFTFSGNGFLYKQVRNMVGTLLKIGNGQMPVEQVKVILSSKNRQLAGPTISGNGLYLKEICYEN

SEQ ID NO: 74747 - protein, 992 aa, Streptococcus pyogenes
MGNQTKTELELEKELIHLLETGESQWTYRKELKTEDALWDNFFKILAQNNTQYLNEEPLTASEKEQIKNQLNFVNYYEAAKWLAGENGIAKVQVQREDAKLGTIRLEVVKADNVAGGTSVYEIANQVAFSGSRDRRGDVTLLINGLPMIQIELKSQNHQCIEAFNQVKKYDKEGQFRGIFSTLQMFVVSNKTDTRYIAAAKENKLNPNFLTQWVDQNNKPQKDLFAFAKEVLSIPRAHQMVMTYSVIDDDKKALILLRPYQIHAIEAVAEASRHRKSGYIWHTTGSGKTLTSYKVARNILQIPAVEKSIFVIDRKDLDNQTASAFQSYAQNDIFDVDETEDTRQLIKNLESSDRRVVVTTIQKLNAMISQMESYDTPKFKKLKERLAHLNVVFVVDECHRAVTPERQRYLTNTFRNSRWYGFTGTPIFVENKRAQLGDLAQTTEQQYGKCLHQYTVKEAIHDKAVLGFQVEYKTTIPDMPEDSIPEEAYDHEEHMLAVLDSIINQSRKKLGFNNGIGQTFEGLLTVKSIARAQAYYDLMKKVKAGETDLVISKKVKEKLPDFPKVAITYSITENDNASISRQDKMTKNLEDYNHLFGTNFTIDNLQGYNRDLNDRLARKKDKFKDRHEQLDLVIVVDRLLTGFDAPCLSTIFIDRQPMKPQHIIQAFSRTNRIFESRKHYGQVVTFQTPLRFKEAVDKALSLYSNGGENDVLAPSWEEEKARFFEKVTVLKNIVPDPDAFPTIESAQTAFLKQYAKAFQAFDKLFASVQVYSDFNETLLSEVGLSDEVIDTYKGTYQNVIAEIRKRREDDEAIPEINIDYELESVQMDDINYHYILTLIQAFVDQEQEALQERLNDNPMDQYIQDLAKSNPAMADSLAELWQDIQKEPKAYEGKSIVYELDNLIGDKIQRAIKHFADQWKADPDKLAFVATNYHSANSTKQVGMSTLKESLDYQAYKEKQGDSAMNKLKYKSQFERELVQFIRDQIQPLKGH

SEQ ID NO: 74748 - protein, 399 aa, Streptococcus pyogenes
MTKSKQPQYRFDGFEGEWEEKELGDIVQITMGQSPSSQNYTTNPSDYILVQGNADIKNGYVFPRVWTTQITKQADKGDIILSVRAPVGDVGKTNYHVIIGRGVAAIKGNEFIFQILKYLKEIGYWKRISTGSTFDSISSSDIKYAKIQIPSLPEQEAIGELFQMVDQLIQLQDQKLATLKEQKQTFLRKMFPAQGQKVPEIRLQGFKGEWEEKKLREVSTHRSGTAIEKYFDSEGEFKVISIGSYGTNNLYVDQNIRAVSNELTNSKLVASGELTMVLNDKTANGAIIGRCLLITENNKYVVNQRTEIIRPDINISSYYLFHYLNGEFRNGIIKIAQGGTQIYVNYSSVEQLKINIPTLKEQEAIGNFFQTLDQQIAQSEEKLTELKALKQTLLNRLFV

SEQ ID NO: 74749 - protein, 526 aa, Streptococcus pyogenes
MAEKTTSLRQALWHSADQLRGQMDANDYKNYLLGLIFYKHLSDKLLLAVCDNLEKHFNTFTEAQKIFEDAYQDEGLKDDLISVVTGDLGYFIEPTLTFEKLIQDVYHNTFQLESLAQGFRDIEQSGEDFENLFEDIDLYSKKLGSTPQKQNQTISNVMKTLNEIDFEAVDGDTLGDAYEYLIGEFASESGKKAGEFYTPQAVSHLMTQIVFLGREDQKGMTLYDPAMGSGSLLLNAKKYSNQSDTVSYYGQEINTSTYNLARMNMMLHGVAIENQHLSNADTLDADWPTDEPINFDGVLMNPPYSLKWSATAGFLTDPRFSSYGVLAPKSKADFAFLLHGFYHLKNTGTMAIVLPHGVLFRGAAEGKIRQKLLEQGAIDTIIGLPSNIFYNTSIPTTIIILKKNRTNKDVFFIDASKEFDKGKNQNTMTDNHIKKILDAYKSRDNSDKFSYLASFDEIIENDYNLNIPRYVDTFEEVPVKPLPELAKQLSDIDQEIAKTNAKLDQLMKQLVGTTKEAQDELDTFRN

SEQ ID NO: 74750 - protein, 245 aa, Streptococcus pyogenes
MKQLVLKDVCKKYPNQLNYALDHINLIVEKGEFVAVMGRSGSGKTTLLNVTSIIDKIDSGNIYCADKEISTFSDKEATNFRKNDIGFVFQDYMLLDSLTIRENISVALSLKNIDSSKIDDLINSYAKRFNLYEQLKKYPYQLSGGQRQRVSIIRAIIKEPEIIFADEPTGALDLKSSEETMMILSEINKTEKVTILMVTHDVLSASYADRVILLKDGKLHMEIDKKDCGESFYDVISQALSDRGE

SEQ ID NO: 74751 - protein, 468 aa, Streptococcus pyogenes
MTKTLPKDFIFGGATAAYQAEGATHTDGKGPVAWDKYLEDNYWYTAEPASDFYNRYPVDLKLSEEFGVNGIRISIAWSRIFPTGKGEVNPKGVEYYHNLFAECHKRHVEPFVTLHHFDTPEALHSDGDFLNRENIEHFVNYAEFCFKEFSEVNYWTTFNEIGPIGDGQYLVGKFPPGIQYDLAKVFQSHHNMMVSHARAVKLFKDSGYSGEIGVVHALPTKYPFDANNPDDVRAAELEDIIHNKFILDATYLGKYSDKTMEGVNHILEVNGGELDLREEDFAALDAAKDLNDFLGINYYMSDWMQAFDGETEIIHNGKGEKGSSKYQIKGVGRRKAPVDVPKTDWDWIIFPQGLYDQIMRVKADYPNYKKIYITENGLGYKDEFVDNTVYDGGRIDYVKKHLEVISDAISDGANVKGYFMWSLMDVFSWSNGYEKRYGLFYVDFETQERYPKKSAYWYKKVAETQVIE

SEQ ID NO: 74752 - protein, 565 aa, Streptococcus pyogenes
MNGLIAQIEKGKPFFEKISRNIYLRAIRDGFIAGMPVILFSSIFILIAYVPNAWGFHWSKDIENLLMTPYNYSMGILGLFVAGTTAKALTDSMNRSLPSTNQINFISTMLAAIVGFLLMAANPAKDGGFLTGFMGTKGLLTAFIAAFITVNVYKACVKNNVTIRMPEEVPPNISQVFKDLIPFTLSVVLLYVIELIVHTTLGVNVAESIGKLLAPLFQAADGYVGITIIFGAFAFFWFVGIHGPSIVEPAIAAITYANAETNLQLLQAGEHADKILTSGTQMFIVTMGGTGATLVVPFMFMWLTKSKRNKAIGRASVVPTFFGVNEPILFGAPLVLNPIFFIPFILAPIVNVWIFKFFIDTLGMNSFTANLPWTTPAPLGLILGTNFQVLAFILAALLIVVDVIIYYPFLKVYDEQILAEEAAGTNSSDALKEKVAANFDTKKADAILEKSAAKETKEITDQTNVLVLCAGGGTSGLLANALNKAAKEYGAPVTAAAGSYGAHREILPQYQLVILAPQVASNYEDMKVETDKLDIKLAKTEGAQYIKLTRDGQGALDFVKAQFEN

SEQ ID NO: 74753 - protein, 105 aa, Streptococcus pyogenes
MNREETTLLGFEIVAYAGDARSKFLEALKAAQEGDYAKAEELIAAGSDCLNDAHNAQTSLLQKEAAGDDLAYSVTLMHGQDHLMTTILLQDLMKHMIELYKRGAK

SEQ ID NO: 74754 - protein, 327 aa, Streptococcus pyogenes
MTITLTENKRKSMEKLSVDGVISALAFDQRGALKRMMAQHQTKEPTVEQIEELKSLVSEELTPFASSILLDPEYGLPASRVRSEEAGLLLAYEKTGYDATTTSRLPDCLDVWSAKRIKEAGAEAVKFLLYYDIDGDQDVNEQKKAYIERIGSECRAEDIPFYLEILTYDEKIADNASPEFAKVKAHKVNEAMKVFSKERFGVDVLKVEVPVNMKFVEGFADGEVLFTKEEAAQAFRDQEASTDLPYIYLSAGVSAKLFQDTLVFAAESGAKFNGVLCGRATWAGSVKVYIEEGPQAAREWLRTEGFKNIDELNKVLDKTASPWTEKM

SEQ ID NO: 74755 - protein, 142 aa, Streptococcus pyogenes
MAIIIGADKAGQELKEVIKDYLKEGKYEVVDVSENEVRDFVDTTLAVVKEVNASDDNLGIVIDAYGVGSFMVATKIKGMVAAEVSDERSAYMTRGHNNARIITLGSEISAPGIAKNIIKGFVEGKYDGGRHQVRVDMLNKMC

SEQ ID NO: 74756 - protein, 130 aa, Streptococcus pyogenes
MAQAQYAGTGRRKNAVARVRLVPGTGKITVNKKDVEEYIPHADLRLIINQPFAVTSTEGSYDVFVNVVGGGYGGQSGAIRHGIARALLQVDPDFRDSLKRAGLLTRDARMVERKKPGLKKARKASQFSKR

SEQ ID NO: 74757 - protein, 148 aa, Streptococcus pyogenes
MNKTTFMAKPGQVERKWYVVDAADVPLGRLSAVVASVLRGKNKPTFTPHTDTGDFVIVINAEKVKLTGKKATDKVYYTHSMYPGGLKSITAGELRSKNAVRLIEKSVKGMLPHNTLGRAQGMKLKVFVGGEHTHAAQQPEVLDISGLI

SEQ ID NO: 74758 - protein, 172 aa, Streptococcus pyogenes
MKKRILLVDGYNMIAFWQSTRQLFKTNQLDQARNTLLTKLNHYAHFENINIICVFDAQYVPGLRQRYDQYYISVVFTEEDETADSYIERMAAELNTAIHMVEVATSDLNEQWTIFSQGALRVTARELEQRVHTVKADLDKMSRDIDLKTPKLRPFDQGQLIQLKDFMSQLDR

SEQ ID NO: 74759 - protein, 447 aa, Streptococcus pyogenes
MIKIYDTMTRSLRKFVPLTENTVNIYVCGPTVYNYIHIGNARSAVAFDTIRRYFEYTGYQVNYISNFTDVDDKIIKAATQAGVSPKELSDRFIAAFIEDTKALGVKPATQNPRVMDYIAEIISFVESLIEKDFAYEADGDVYFRVEKSEHYAKLANKTLSELEVGASGRTDAETALKENPLDFALWKSAKAGEVSWDSPWGFGRPGWHIECSVMATEILGDTIDIHGGGADLEFPHHTNEIAQSEAKTGKTFANYWMHNGFVTVDNEKMSKSLGNFVTVHDMLQTVDGQVLRFFLATQQYRKPINFTEKTIHDAEINLKYLKNTLQQPLTETADEQELKQFVIAFQDAMDDDFNTANGITVVFDMAKWINSGSYTEPVKSAFEKMLAVFGIIFEEEVLEVDIEALIAKRQEARANRDFATADAIRDQLAVQGIKLLDTKDGVRWLRD

SEQ ID NO: 74760 - protein, 193 aa, Streptococcus pyogenes
MGWWKESIAIVKALDPAARNSLEVILTYPGIKALAAHRLSHFLWRHHFKLLARMHSQFWRFWTQIEIHPGAQIAPGVFIDHGAGLVIGETAIVEKGVMLYHGVTLGGTGKDCGKRHPTVRQGALISAHAQVIGPIDIGANAKVGAAAVVLSDVPEDVTVVGVPAKIVRVHGQKDNRQIQSLQKQREVSYQLSK

SEQ ID NO: 74761 - protein, 710 aa, Streptococcus pyogenes
MSKQTFTTTFAGKPLVVEVGQVAKQANGATVVRYGDSTVLTAAVMSKKMATGDFFPLQVNYEEKMYAAGKFPGGFMKREGRPSTDATLTARLIDRPIRPMFAEGFRNEVQVINTVLSYDENASAPMAAMFGSSLALSISDIPFNGPIAGVQVGYIDGEFIINPDKEQMEASLLELTVAGSKEAINMVESGAKELSEDIMLEALLKGHQAIQELIAFQEQIVAVVGKEKAEVELLQVDVDLQADIVAKYNAQLQKAVQVEEKKAREAATEAVKEMVKAEYEERYAEDENLATIMRDVAEILEQMEHAEVRRLITEDKIRPDGRKIDEIRPLDAVVDFLPKVHGSGLFTRGQTQALSVLTLAPMGETQIIDGLAPEYKKRFLHHYNFPQYSVGETGRYGAAGRREIGHGALGERALEQVLPSLEEFPYAIRLVAEVLESNGSSSQASICAGTLALMAGGVPIKAPVAGIAMGLISDGTNYTVLTDIQGLEDHFGDMDFKVAGTREGITALQMDIKIAGITPQILEEALAQAKKARFEILDVIEATIAEPRPELAPTAPKIDTIKIDVDKIKVVIGKGGETIDKIIAETGVKIDIDDEGNVSIYSSDQAAIDRTKEIIAGLVREAKVGEVYHAKVVRIEKFGAFVNLFDKTDALVHISEIAWTRTTNVSDVLEVGEDVDVKVIKIDEKGRVDASMKALIPRPPKPEKKEEKHD

SEQ ID NO: 74762 - protein, 243 aa, Streptococcus pyogenes
MMTKKLNVKVFSDGAVLETMLKDLQTGLVTGFTTNPSLMKKAGISSYIGFAKEVLAKITDYPVSFEVFADDLASMEKEAEKIASLGDNVYVKIPVTTSTGESTCPLIQKLSAKGIKLNVTAIFTIEQTQAVVDHLTARVPAIVSVFAGRIADTGVDPMPIMEEALRICRQKEGVELLWASPRETYNIYQADQLGVDIITCTTDLIAKLPLQGKDLEDYSLETVQMFLKDSTSLGFKILEDYNH

SEQ ID NO: 74763 - protein, 411 aa, Streptococcus pyogenes
MEALLSFIRDILKEPAFLMGLIAFAGLVALKTPAHKVLTGTLGPILGYLMLVAGAGVIVTNLDPLAKLIEHGFSITGVVPNNEAVTSVAQKILGVETMSILVVGLLLNLAFARFTRFKYIFLTGHHSFFMACLLSAVLGAVGFKGSLLIILDGFLLGAWSAISPAIGQQYTLKVTDGDEIAMGHFGSLGYYLSAWVGSKVGKDSKDTEDLQISEKWSFLRNTTISTGLIMVIFYLVATVASVLRNASVAEELAAGQNPFIFAIKSGLTFAVGVAIVYAGVRMILADLIPAFQGIANKLIPNAIPAVDCAVFFPYAPTAVIIGFASSFVGGLLGMLILGVAGGVLIIPGMVPHFFCGATAEIFGNSTGGRRGAMIGASLMAYYSPSCQPCFYLYLVNLVFQTRPLEMWISVF

SEQ ID NO: 74764 - protein, 686 aa, Streptococcus pyogenes
MLSHELIRNYQLFSKYKGHSLEAFESILKASKRHILADIAKINDTLSLYQLPLIALDRQLVYPPDLTEKDLLNRMLPTLDDYLFQDERLDMIIIYIMMAKEFISINHLESLLRLSRNSVIADLNLVRDRVQAFQVTLAYNRQDGYFFEGEPLALRRLLESAVSSLLQVTSGPWVFSYLLHELGLPDQKKVMAATLEELSRENHLTFISEKLRDLIYFFCLLAHRPFSRNVRAEAVDTFPLASPAVETMVDQLLVNFPSLTEEKYLVQSRLLGCIQGDLELVFQQPIYDIMEEIINSVAVNTGLSITDTPELRQNLYSHLLPAYYRLYYDINLTNPLKEQIKQDYESLFYLVKRSLSPLEKQLGKSVNEDEVAYFTIHFGRWLQAPKKRPSNQLVALSVCPNGISSSLMLEATLKELFPQLQFIRIHQLDKIKLLDPASFDLIFSTVAFDCAKPVYVTQALMGPVEKMMLKKMVCDDFHLPLSEQFALDDLLSIIHKHTTITNKEGLVSDLSRYLIGNHLTIEKGGLGLLDLLTADFIRQADAVSDWQEAIRLAAQPLLEHQMIETSYIDGMIDSVNELGAYIVLAPKVAVPHAAPEKGTRQLGMSLLQLKEPVSFDLKQEGDPDKQVQLIFVLSAVDSSSHLKALQELSLILDDDEHIEQLIEAKNTEEIMSLISHMIEKGDESHD

SEQ ID NO: 74765 - protein, 89 aa, Streptococcus pyogenes
MAISKEKKNEIIAQYARHEGDTGSVEVQVAVLTWEINHLNSHIKQHKKDHATYRGLMKKIGHRRNLLAYLRRTDVNRYRELIQSLGLRR

SEQ ID NO: 74766 - protein, 142 aa, Streptococcus pyogenes
MSHLDKNTALKAMVVFRKAQRTLDAFGADIFKKADLTATQFSVLEVLYTKGCMRINHLIDSLLATSGNMTVVLNNMERNGWISKCKDKTDKRAYVVTLTDKGTRLIEAVLPKHVARVEEAFAVLTEKEQLCLIELLKKFKQL

SEQ ID NO: 74767 - protein, 1465 aa, Streptococcus pyogenes
MSDLFAKLMDQIEMPLDMRRSSAFSSADIIEVKVHSVSRLWEFHFAFAAVLPIATYRELHDRLIRTFEAADIKVTFDIQAAQVDYSDDLLQAYYQEAFEHAPCNSASFKSSFSKLKVTYEDDKLIIAAPGFVNNDHFRNNHLPNLVKQLEAFGFGILTIDMVSDQEMTEHLTKNFVSSRQALVKKAVQDNLEAQKSLEAMMPPVEEATPAPKFDYKERAAKRQAGFEKATITPMIEIETEENRIVFEGMVFDVERKTTRTGRHIINFKMTDYTSSFALQKWAKDDEELRKFDMIAKGAWLRVQGNIETNPFTKSLTMNVQQVKEIVRHERKDLMPEGQKRVELHAHTNMSTMDALPTVESLIDTAAKWGHKAIAITDHANVQSFPHGYHRARKAGIKAIFGLEANIVEDKVPISYEPVDMDLHEATYVVFDVETTGLSAMNNDLIQIAASKMFKGNIVEQFDEFIDPGHPLSAFTTELTGITDKHLQGAKPLVTVLKAFQDFCKDSILVAHNASFDVGFMNANYERHDLPKITQPVIDTLEFARNLYPEYKRHGLGPLTKRFQVSLDHHHMANYDAEATGRLLFIFLKDAREKHGIKNLLQLNTDLVAEDSYKKARIKHATIYVQNQVGLKNMFKLVSLSNIKYFEGVPRIPRTVLDAHREGLLLGTACSDGEVFDAVLTKGIDAAVDLARYYDFIEIMPPAIYQPLVVRELIKDQAGIEQVIRDLIEVGKRAKKPVLATGNVHYLEPEEEIYREIIVRSLGQGAMINRTIGRGEGAQPAPLPKAHFRTTNEMLDEFAFLGKDLAYQVVVQNTQDFADRIEEVEVVKGDLYTPYIDKAEETVAELTYQKAFEIYGNPLPDIIDLRIEKELTSILGNGFAVIYLASQMLVNRSNERGYLVGSRGSVGSSFVATMIGITEVNPMPPHYVCPSCQHSEFITDGSVGSGYDLPNKPCPKCGTPYQKDGQDIPFETFLGFDGDKVPDIDLNFSGDDQPSAHLDVRDIFGDEYAFRAGTVGTVAEKTAYGFVKGYERDYGKFYRDAEVDRLAAGAAGVKRTTGQHPGGIVVIPNYMDVYDFTPVQYPADDVTASWQTTHFNFHDIDENVLKLDILGHDDPTMIRKLQDLSGIDPITIPADDPGVMALFSGTEVLGVTPEQIGTPTGMLGIPEFGTNFVRGMVNETHPTTFAELLQLSGLSHGTDVWLGNAQDLIKEGIATLKTVIGCRDDIMVYLMHAGLEPKMAFTIMERVRKGLWLKISEEERNGYIDAMRENNVPDWYIESCGKIKYMFPKAHAAAYVLMALRVAYFKVHHPIMYYCAYFSIRAKAFELKTMSGGLDAVKARMEDITIKRKNNEATNVENDLFTTLEIVNEMLERGFKFGKLDLYKSDAIEFQIKGDTLIPPFIALEGLGENVAKQIVKARQEGEFLSKMELRKRGGASSTLVEKMDEMGILGNMPEDNQLSLFDDFF

SEQ ID NO: 74768 - protein, 618 aa, Streptococcus pyogenes
MKQSKLLIPTLREMPSDAQVISHALMVRAGYVRQVSAGIYAYLPLANRTIEKFKTIMREEFEKIGAVEMLAPALLTADLWRESGRYETYGEDLYKLKNRDNSDFILGPTHEETFTTLVRDAVKSYKQLPLNLYQIQSKYRDEKRPRNGLLRTREFIMKDGYSFHHNYEDLDVTYEDYRQAYEAIFTRAGLDFKGIIGDGGAMGGKDSQEFMAITPARTDLDRWVVLDKSIASMDDIPKEVLEDIKAELAAWMISGEDTIAYSTESSYAANLEMATNEYKPSSKVAAEDALAEVETPHCKTIDEVAAFLSVDETQTIKTLLFVADNEPVVALLVGNDHINTVKLKNYLAADFLEPASEEEARAFFGAGFGSLGPVNLAQGSRIVADRKVQNLTNAVAGANKDGFHMTGVNPGRDFQAEYVDIREVKEGEMSPDGHGVLQFARGIEVGHIFKLGTRYSDSMGATILDENGRTVPIVMGCYGIGVSRILSAVIEQHARLFVNKTPKGDYRYAWGINFPKELAPFDVHLITVNVKDQVAQDLTAKLEADLMAKGYDVLTDDRNERVGSKFSDSDLIGLPIRVTVGKKAAEGIVEIKIKATGDSIEVNAENLIETLEILTKEH

SEQ ID NO: 74769 - protein, 264 aa, Streptococcus pyogenes
MKERVVWGGVAVAIFLPFLIIGNLPFQLFVGVLAMIGVSELLKMKRLEVFSFEGVFAMLAAFVLAVPMDHYLTFLPIDANVAFYSLMVFFILAGTVLNSRAYSFDDAAFPIATSFYVGIGFQHLINARLSGIDKVFLALFIVWATDIGAYLIGRQFGRRKLLPTVSPNKTIEGSLGGIACAVLVSFIFMVIDRSVYAPHHFLTMLVLVALFSIFAQFGDLVESALKRHFGVKDSGKLIPGHGGILDRFDSMIFVFPIMHLFGLF

SEQ ID NO: 74770 - protein, 249 aa, Streptococcus pyogenes
MFGLKAKSTKKVLGSIPKHIGIIMDGNGRWAKKRLKPRVFGHKAGMDALQEVTITASELGVKVLTVYAFSTENWSRPQDEVSFIMNLPVTFFDKYVPVLHENNVKIQMIGETSRLPEDTLAALNAAIDKTKRNTGLILNFALNYGGRAEITSAVRFIAQDVLDAKLNPGDITEDLIANYLMTDHLPYLYRDPDLIIRTSGELRLSNFLPWQSAYSEFYFTPVLWPDFKKAELLKAIADYNRRQRRFGKV

SEQ ID NO: 74771 - protein, 537 aa, Streptococcus pyogenes
MNNHWWHKATIYQIYPRSFKDTSGNGIGDLKGITSQLDYLQKLGITAIWLSPVYQSPMDDNGYDISDYEAIADVFGDMADMDELLAAANERGIKIIMDLVVNHTSDEHAWFVEARENPNSPERDYYIWRDEPNNLMSIFSGSAWELDEASGQYYLHLFSKKQPDLNWENAQLRQKIYDMMNFWIAKGIGGFRMDVIDLIGKVPDLEITGNGPRLHDYLKEMNQATFGNHDVMTVGETWGATPEIARQYSRPENKELSMVFQFEHVGLQHKPDAPKWDYAKELDVPALKAIFSKWQTELKLGEGWNSLFWNNHDLPRVLSIWGNDSTYREKSAKALAILLHLMRGTPYIYQGEEIGMTNYPFKDLTEVNDIESLNYAKEAMGNGVSAARVMDSIRKVGRDNARTPMQWSKDTHAGFSEAKETWLPVNPNYQDINVADALADPDSIFYTYQKLIALRKEQDWLVEADYHLLPTADKVFAYQRQLGEETYVIVVNVSDEEQVFATDLAGAQVIIANTDVDTVLETKHLQPWDAFCLKLKA

SEQ ID NO: 74772 - protein, 282 aa, Streptococcus pyogenes
MELKDYFPEMQVGPHPLGDKDWMSIKEGDQYVHFPKSCLSEKERLLLEVGLGQCEVLQPLGSPWQRYLLDHQGNPPQLYETSQFIYLNHQQALPDDLVELLQQMIAGLEVILPISATQTAFLCRQAISIKVLRWLEDLLPTLESDFGLALTMFVGNAWYQVAAGTLRECFEEECQLLTAYLRQQSGRKLLTFSGLMLWSLLSHHTFLALTRQFHQFLSPQSDMADVVHALWSEHGNLVQTAQRLYIHRNSLQYKLDKFAQQSGLHLKQLDDLAFAHLFLLKY

SEQ ID NO: 74773 - protein, 743 aa, Streptococcus pyogenes
MRNEMAKIMNVTGEEVIALAATYMTKADVAFVAKALAYATAAHFYQVRKSGEPYIVHPIQVAGILADLHLDAVTVACGFLHDVVEDTDITLDEIEADFGHDARDIVDGVTKLGEVEYKSHEEQLAENHRKMLMAMSKDIRVILVKLADRLHNMRTLKHLRKDKQERISRETMEIYAPLAHRLGISRIKWELEDLAFRYLNETEFYKISHMMKEKRREREALVEAIVSKVKTYTTQQGLFGDVYGRPKHIYSIYRKMRDKKKRFDQIFDLIAIRCVMETQSDVYAMVGYIHELWRPMPGRFKDYIAAPKANGYQSIHTTVYGPKGPIEIQIRTKDMHQVAEYGVAAHWAYKKGVRGKVNQAEQAVGMNWIKELVELQDASNGDAVDFVDSVKEDIFSERIYVFTPTGAVQELPKESGPIDFAYAIHTQIGEKATGAKVNGRMVPLTAKLKTGDVVEIITNANSFGPSRDWVKLVKTNKARNKIRQFFKNQDKELSVNKGRDLLVSYFQEQGYVANKYLDKKRIEAILPKVSVKSEESLYAAVGFGDISPISVFNKLTEKERREEERAKAKAEAEELVKGGEVKHENKDVLKVRSENGVIIQGASGLLMRIAKCCNPVPGDPIDGYITKGRGIAIHRSDCHNIKSQDGYQERLIEVEWDLDNSSKDYQAEIDIYGLNRSGLLNDVLQILSNSTKSISTVNAQPTKDMKFANIHVSFGIPNLTHLTTVVEKIKAVPDVYSVKRTNG

SEQ ID NO: 74774 - protein, 728 aa, Streptococcus pyogenes
MKTSFKQLFRFEFWQKFGKCLMVVIAVMPAAGLMISIGNSIPMINHDSAFLASLGNIIAQIGWAVIVNLHLLFALAIGGSWAKERAGGAFASGLAFVLINRITGAFYGVSSTMLADPEAKITSLLGTQMIVKDYFTSVLESPALNTGVFVGIIAGFVGATAYNKYYNYRKLPEVLTFFNGKRFVPFVVILRSIFVALILVVVWPVIQSGINSFGMWIASSQDSAPILAPFLYGTLERLLLPFGLHHMLTIPMNYTALGGTYEVMTGAAAGTKVFGQDPLWLAWVTDLVHLKGSDASAYSHLMDSVTPARFKVGQMIGATGTLMGVALAMYRNVDADKKHTYKMMFISAAAAVFLTGVTEPLEYLFMFAAMPLYIVYALVQGASFAMADLVNLRVHSFGNIELLTRTPMALKAGLGMDVINFVWVSVLFAVIMYFIADMMIKKMHLATAGRLGNYDADILGDRNTQTRPTQVADSNSQVVQIVNLLGGAGNIDDVDACMTRLRVTVKDPAKVGAEDDWKKAGAIGLIQKGNGVQAVYGPKADILKSDIQDLLDSGALIPEVNMSQLTSKPTPAKDFKHVTEDVLSVADGMVLPITGVKDQVFAAKMMGDGFAVEPTHGNIYAPVAGLVTSVFPTKHAFGLLTDNGLEVLVHVGLDTVALNGVPFSVKVSEGQRVHAGDLLVVADLAAIKSAERETIIVVAFTNTTEIQDVTLTSLGAQPAKTKVATVEL

SEQ ID NO: 74775 - protein, 249 aa, Streptococcus pyogenes
MQQYFIKGKAEKKVTITDKDTIKHMFQVMRLADEAEVVLVFDDGVKYLAKVTNSMAHELEIIEALPDQVELPVKVTIASGFPKGDKLDTIAQKVTELGASALWGYPADWSVVKWDGKKLAKKEDKLAKIVLGAAEQSKRNRVPEVHLFEHKAEFLKSLSSFDHIFIAYEETAKAGQLATLAREVKEVKPGAKILFIFGPEGGISPTEITQFEAASAIKVGLGPRIMRAETAPLYALSALSYALELQASK

SEQ ID NO: 74776 - protein, 585 aa, Streptococcus pyogenes
MHRKTIIDFKELGQRYLFDEPLVELVAKSLDQVGPVIEKVQHYQQLGYYVVGYLSYEAAAFFDNALQTHNDRLGNEYLAYFTVHKTCQKKDLPLDYDSITIPNQWVSATQKEAYQKAIETIHREMQQGNTYQVNYTLQLTQELNAADSLAIYNKLVVEQAAGYNAYIAHDEFAVISASPELFFKQEGNRLTTRPMKGTTKRGVNSWLDQQEHDWLQADGKNRSENMMIVDLLRNDMGKICQTGSVRVDRLCEVERYSTVWQMTSTIVGDLKADCDLIDILKALFPCGSITGAPKVSTMAIITSLEPKPRGIYCGSIGICLPDGRRFFNVPIRTIQLSHNQATYGVGGGITWQSKWEDEYEEVHQKTAFLYRHKQIFDLKTTAKVEHKKIAFLEQHLNRLKEAATYFAYPYNEKALQKQLSTYLENKNNAAYRLMIRLSKDGKISLSDQPLEPLSADFLTAQLSLQKKDVTASPFTYFKTSYRPHIEQKSYEQLFYNQAGQLLETSIGNLFVQLGQTLYTPPVAVGILPGLFRQELLATGQAQEKEVTLADLKEASAIFGGNAVRGLYPLNLELTHLDALLAKSQA

SEQ ID NO: 74777 - protein, 422 aa, Streptococcus pyogenes
MPDHLALRMRPKTISEVIGQKHLVGEGKIIRRMVEANRLSSMILYGPPGIGKTSIASAIAGTTRYAFRTFNATIDSKKRLQEIAEEAKFSGGLVLLLDEIHRLDKTKQDFLLPLLENGTIIMIGATTENPFFSVTPAIRSRVQIFELEPLSNEDIKTAIQLAISDKERGFPFLVTIDDEALDFIVTATNGDLRSAYNSLDLAVMSTSPNEDGSRHISLETMENSLQRSYITMDKNGDGHYDVLSALQKSIRGSDVNASLHYAARLVEAGDLPSLARRLTIIAYEDIGLANPDAQVHTVTALDAAQRIGFPEARIPIANVVIDLALSPKSNSAYLAMDAALADLRTSGNLPIPRHLRDGHYAGSKDLGNAKDYLYPHAYPEKWVKQQYLPDKLVGHHYFEANETGKYERALGSNKERIDKLSD

SEQ ID NO: 74778 - protein, 542 aa, Streptococcus pyogenes
MSKYLKYFSIITLFLTGLILVACQQQKPQTKERQRKQRPKDELVVSMGAKLPHEFDPKDRYGVHNEGNITHSTLLKRSPELDIKGELAKTYHLSEDGLTWSFDLHDDFKFSNGEPVTADDVKFTYDMLKADGKAWDLTFIKNVEVVGKNQVNIHLTEAHSTFTAQLTEIPIVPKKHYNDKYKSNPIGSGPYMVKEYKAGEQAIFVRNPYWHGKKPYFKKWTWVLLDENTALAALESGDVDMIYATPELADKKVKGTRLLDIPSNDVRGLSLPYVKKGVITDSPDGYPVGNDVTSDPAIRKALTIGLNRQKVLDTVLNGYGKPAYSIIDKTPFWNPKTAIKDNKVAKAKQLLTKAGWKEQADGSRKKGDLDAAFDLYYPTNDQLRANLAVEVAEQAKALGITIKLKASNWDEMATKSHDSALLYAGGRHHAQQFYESHHPSLAGKGWTNITFYNNPTVTKYLDKAMTSSDLDKANEYWKLAQWDGKTGASTLGDLPNVWLVSLNHTYIGDKRINVGKQGVHSHGHDWSLLTNIAEWTWDESTK

SEQ ID NO: 74779 - protein, 273 aa, Streptococcus pyogenes
MILKRRTMVLWQLGIAISLILSILALNLYFYRTPLETNAALRNLAPSLNHLFGTDGLGRDMFVRTIKGLYFSLQVGLLGALMGVFLATVFGVLAGLGNSLIDKIIAWLVDLFIGMPHLIFMILISFVVGKGAQGVIIATAVTHWPSLARLIRNEVYDLKNKAFVQLSKSMGKTPYYIVRHHILPLIASQIFIGFILLFPHVILHEASMTFLGFGLSAEQPSVGIILSEAAKHISLGNWWLVIFPGLYLILVVNAFDTIGESLKKLFYPQTDHF

SEQ ID NO: 74780 - protein, 66 aa, Streptococcus pyogenes
MSEEKLKSKIEQASGGLKEGAGKLTGDKELEAKGFVEKTIAKGKELADDAKEAVEGAVDAVKEKLK

SEQ ID NO: 74781 - protein, 379 aa, Streptococcus pyogenes
MRRAENNKHSRYSIRKLSVGVTSIAIASLFLGKVAYAVDGIPPISLTQKTTATTSENWHHIDKDGLIPLGISLEAAKEEFKKEVEESRLSEAQKETYKQKIKTAPDKDKLLFTYHSEYMTAVKDLPASTESTTQPVEAPVQETQASASDSMVTGDSTSVTTDSPEETPSSESPVAPALSEAPAQPAESEEPSVAASSEETPSPSTPAAPETPEEPAAPSPSPESEEPSVAAPSEETPSPETPEEPAAPSQPAESEESSVAATTSPSPSTPAESETQTPPAVTKDSDKPSSAAEKPAASSLVSEQTVQQPTSKRSSDKKEEQEQSYSPNRSLSRQVRAHESGKYLPSTGEKAQPLFIATMTLMSLFGSLLVTKRQKETKK

SEQ ID NO: 74782 - protein, 805 aa, Streptococcus pyogenes
MTETKSPYFGHLTDRMTHYREAVLDKKPYIDAERAILATEAYQKHQNKPANLKRAYMLQTILENMTIYIEDESLIAGNQASSNKDAPIFPEYTLEFVLNELDLFEKRDGDVFYITEETKQQLRDIAPFWENNNLRARCGVLLPEEVQVYMETGFFGMEGKMNSGDAHLAVNYQKLLEHGLKGFEERARAAKAALDLTIPENIDKYHFYDSVFIVIDAVKTYAKRYAKLARELAKTAKPERQAELLDIARICDKVPYEPAKTFAEAVQSVWFIQCILQIESNGHSLSYGRFDQYMYPYVKADLEAGRETEDTIVERLTNLWIKTLTINKVRSQAHTFSSAGSPLYQNVTIGGQTRDKKDAVNPLSYLVLRSVAQTKLPQPNLTVRYHKGLDNTFMNECIEVMKLGFGMPAMNNDEIIIPSFIKKGVSEEDAYDYSAIGCVETAVPGKWGYRCTGMSYINFPKILLITMNDGIDPASGKRFAKGHGHFKDMTSYEELKAAWDATLREITRMSVIVENAIDLGLEREVPDILCSALTDDCIGRGKTLKEGGAVYDYISGLQVGIANLSDSLAALKKLVFEEGRLTPEELWKALESDFAGERGEDIRQMLINDAPKYGNDDDYADSLVVEAYDTYIDEIAKYPNTRYGRGPIGGIRYSGTSSISANVGQGKGTLATPDGRHAGTPLAEGCSPEHSMDKKGPTSVLKSVAKLPTDEIVGGVLLNQKVNPQTLAKEEDKLKLMALLRTFFNRLHGYHIQYNVVSRETLIDAQKHPEKHRDLIVRVAGYSAFFNVLSKATQDDIIERTEHTL

SEQ ID NO: 74783 - protein, 326 aa, Streptococcus pyogenes
MKEERRRLLAKVAYLHYVQGKSQTLISKEMNIYRTTVCRMLAKAKEEGIVRIEIADYDADLFALEEYVRQQYGLEKLDLVPNQVEDTPMDTLTNVAKTAAEVFRHVVKDGDKIGLSWGATLSCLMDELNPKAMKDVFIYPLAGGPSHINAKYHVNTLVYRLARIFHGNSAFMNAMVIQEDKHLAKGILQSKYFNDILTSWDQLDLALVGIGGEPNSLEQSQWRDLLTSSDHDQLKYEKAVGEVCCRFFDQAGQPVYTGLQDRTIGISLEQLRRVPKTMAVATGKHKAKAILAALKAGFINYLVTDKETMLAVLALDEDIDLNNVLL

SEQ ID NO: 74784 - protein, 58 aa, Streptococcus pyogenes
MGFISGTFKVLKDTTWPNRKQRWKDFISVLEYTAFFTVIIYIFDQLLAKSVLALINLF

SEQ ID NO: 74785 - protein, 543 aa, Streptococcus pyogenes
MAKDIKFSADARAAMVRGVDMLADTVKVTLGPKGRNVVLEKAFGSPLITNDGVTIAKEIELEDHFENMGAKLVSEVASKTNDIAGDGTTTATVLTQAIVHEGLKNVTAGANPIGIRRGIETATATAVEALKAIAQPVSGKEAIAQVAAVSSRSEKVGEYISEAMERVGNDGVITIEESRGMETELEVVEGMQFDRGYLSQYMVTDNEKMVADLENPFILITDKKVSNIQDILPLLEEVLKTNRPLLIIADDVDGEALPTLVLNKIRGTFNVVAVKAPGFGDRRKAMLEDIAILTGGTVITEDLGLELKDATMTALGQAAKITVDKDSTVIVEGSGSSEAIANRIALIKSQLETTTSDFDREKLQERLAKLAGGVAVIKVGAPTETALKEMKLRIEDALNATRAAVEEGIVAGGGTALITVIEKVAALELEGDDATGRNIVLRALEEPVRQIALNAGYEGSVVIDKLKNSPAGTGFNAATGEWVDMIKTGIIDPVKVTRSALQNAASVASLILTTEAVVANKPEPATPAPAMPAGMDPGMMGGF

SEQ ID NO: 74786 - protein, 814 aa, Streptococcus pyogenes
MIMYSTKMQDIFRQAQFQAARFDSHCLETWHVLLAMVAVDNSLANMILSEYDAQVAIEEYEAAAILAMGKTPKEQLSRVDFRPQSKTLTNLLAFAQAISQITRDQEVGSEHVLFAILLNPDIMASRLLEIAGYQIKDNGNGQPRLADLRKAIERHAGYSKEMIKAIHELRKPKKTKTQGTFSDMMKPPSTAGELSDFTRDLTEMARQGLLESVIGRDQEVSRMIQVLSRKTKNNPVLVGDAGVGKTALAYGLAQRIANGAIPYELKEMRVLELDMMSVVAGTRFRGDFEERMNQIIDDIEADGQIILFVDELHTIMGSGSGIDSTLDAANILKPALSRGTLHMVGATTQEEYQKHIEKDAALSRRFAKILIEEPNTEDAYQILMGLKLSYETYHNVSISNEAVKTAVKMAHRYLTSKNLPDSAIDLLDEASAAVQNMVKKSAPETLTPIDQALINGDMKKVSRLLAKEAKGQMRKPTPVTEDDILATLSKLSGIPLEKLTQADSKKYLNLEKELHKRVIGQDAAVTAISRAIRRNQSGIRTGKRPIGSFMFLGPTGVGKTELAKALAEVLFDDEAALIRFDMSEYMEKFAASRLNGAPPGYVGYDEGGELTQKVRNKPYSVLLFDEVEKAHPDIFNVLLQVLDDGILTDSRGRKVDFSNTIIIMTSNLGATALRDDKTVGFGVKDIHQDHQAMEKRILEELRKTYRPEFINRIDEKVVFHSLTQDNMRDVVKIMVQPLITTLAEKGITLKIQPLALKHLSEVGYDEHMGARPLRRTLQTEIEDKLSELILSRELTSGHTLKIGLSHGKLTFHIA

SEQ ID NO: 74787 - protein, 186 aa, Streptococcus pyogenes
MSLIGKEIAEFSAQAYHDGKFITVTNEDVKGKWAVFCFYPADFSFVCPTELGDLQEQYETLKSLGVEVYSVSTDTHFVHKAWHDDSDVVGTITYPMIGDPSHLISQAFEVLGEDGLAQRGTFIVDPDGIIQMMEINADGIGRDASTLIDKIHAAQYVRKHPGEVCPAKWKEGAETLTPSLDLVGKI

SEQ ID NO: 74788 - protein, 428 aa, Streptococcus pyogenes
MLKKEVFMVADVLLTHFNQLFCLNDPGHPLTGQEMKKATIVEDGYIAIKDGLIVALGSGEPDAELVGTQTIMRSYKGKIATPGIIDCHTHLVYGGSREHEFAKKLAGVSYLDILAQGGGILSTVRATRSASFDNLYQKSKRLLDYMLLHGVTTVEAKSGYGLDWETEKRQLDVVAALEKDHPIDLVSTFMAAHAIPEEYKGNPKAYLDVIIKDMLPVVKEENLAEFCDIFCEKNVFTADESRYLLSKAKEMGFKLRIHADEIASIGGVDVAAELSAVSAEHLMMITDDGIAKLIGAGVIGNLLPATTFSLMEDTYAPARKMIDAGMAITLSTDSNPGSCPTANMQFVMQLGCFMLRLTPIEVLNAVTINAAYSVNRQERVGSLTVGKEADIAIFDAPNIDYPFYFFATNLIHQVYKKGQLTVDRGRIL

SEQ ID NO: 74789 - protein, 676 aa, Streptococcus pyogenes
MSFYSETDIAAAMTVKLDDVLPEKTVFEEGIRRAPDRGFRLTQAQTEIALKNALRYVPTKFHEEVIPEFLEELKTRGRIYGYRFRPKDRIYGKPIDEYKGNCTAAKAMQVMIDNNLSFEIALYPYELVTYGETGSVCANWMQYCLIKKYLEVMTDEQTLVVESGHPVGLFKSKPEAPRVIITNGLLVGEYDNMKDWEIAEEMGVTNYGQMTAGGWMYIGPQGIVHGTFNTLLNAGRLKLGVADDGDLTGKLFISSGLGGMSGAQGKAAEIAKAVAIIAEVDQSRIKTRHSQGWISQIAESPEEALQLAQKAIDAKESTSIAYHGNIVDLLEYVNDKQIHVDLLSDQTSCHNVYDGGYCPVGISFDERTRLLAEDKDTFHQMVDDTLARHFEAIKTLTENGTYFFDYGNAFMKSVYDSGITEISKNGRNDKDGFIWPSYVEDIMGPMLFDYGYGPFRWVCLSGNHDDLVATDKAAMEAIDPDRRYQDRDNYNWIRDAEKNQLVVGTQARILYQDCIGRVTIALKFNELVRKGKIGPVMIGRDHHDVSGTDSPFRETSNIKDGSNVTCDMAVQCYAGNAARGMSLVALHNGGGTGIGKAINGGFGLVLDGSERIDEIIKSAIAWDTMGGVARRNWARNEHAIETAIEYNRLHAGTDHITIPYLADDDLVTSAVDQLFH

SEQ ID NO: 74790 - protein, 557 aa, Streptococcus pyogenes
MVLSDIEIANSVTMEPISKVADQLGIDKEALCLYGKYKAKIDARQLVALKNKPDGKLILVTAISPTPAGEGKTTTSVGLVDALSAIGKKAVIALREPSLGPVFGVKGGAAGGGHAQVVPMEDINLHFTGDFHAIGVANNLLAALIDNHIHHGNSLGIDSRRITWKRVVDMNDRQLRHIVDGLQGKVNGIPREDGYDITVASEIMAILCLSENISDLKARLEKIIIGYNYQGEPVTAKDLKAGGALAALLKDAIHPNLVQTLEHTPALIHGGPFANIAHGCNSVLATKLALKYGDYAVTEAGFGADLGAEKFIDIKCRMSGLRPAAVVLVATIRALKMHGGVPKADLATENVQAVVDGLPNLDKHLANIQDVYGLPVVVAINKFPLDTDAELQAVYDACDKRGVDVVISDVWANGGAGGRELAEKVVTLAEQDNQFRFVYEEDDSIETKLTKIVTKVYGGKGINLSSAAKRELADLERLGFGNYPICMAKTQYSFSDDAKKLGAPTDFTVTISNLKVSAGAGFIVALTGAIMTMPGLPKVPASETIDIDEEGNITGLF

SEQ ID NO: 74791 - protein, 513 aa, Streptococcus pyogenes
MTRVINLDGESLTIEDVIAIARQGVACHIDDSAIEAVNASRKIVDDIVSEKRVVYGVTTGFGSLCNVSISPEDTVQLQENLIRTHASGFGDPLPEDAVRAIMLIRINSLVKGYSGIRLSTIEKLLELLNKGVHPYIPEKGSLGASGDLAPLAHMVLPMLGLGKAYYKGELLSGQEALDKAGIDKISLAAKEGLALINGTTVLTAVGALATYDAIQLLKLSDLAGALSLEVHNGITSPFEENLHTIRPQSGQLATARNIRNLLEGSQNTTVATQSRVQDPYTLRCMPQIHGASKDSIAYVKSKVDIEINSVTDNPIICKDGHVISGGNFHGEPMAQPFDFLGIAISEIGNVSERRVERLVNSQLSKLPSFLVKYPGLNSGFMITQYACASLASENKVLAHPASVDSIPSCENQEDFVSMGTTAARKAFEILKNSRRIVATEIMAACQALDLKPENHELGKGTKVAYDLFRKEVNFIEHDKHIEIYDELNKASAVIEDPSFLEAVEQAVELSIQF

SEQ ID NO: 74792 - protein, 328 aa, Streptococcus pyogenes
MLEDYYPSTTSYYHGGIDDDLYTAKWGMVMTFLDLNDSSLTPFEGTHFALIGFKSDKGVYINNGRVGAVESPAAIRTQLAKFPWHLGNQVMVYDVGNIDGPNRSLEQLQNSLSKAIKRMCDLNLKPIVLGGGHETAYGHYLGLRQSLSPSDDLAVINMDAHFDLRPYDQTGPNSGTGFRQMFDDAVADKRLFKYFVLGIQEHNNNLFLFDFVAKSKGIQFLTGQDIYQMGHQKVCRAIDRFLEGQERVYLTIDMDCFSVGAAPGVSAIQSLGVDPNLAVLVLQHIAASGKLVGFDVVEVSPPHDIDNHTANLAATFIFYLVQIMAQHS

SEQ ID NO: 74793 - protein, 255 aa, Streptococcus pyogenes
MAVISMKQLLEAGVHFGHQTRRWNPKMAKYIFTERNGIHVIDLQQTVKLADQAYEFVRDAAANDAVILFVGTKKQAAEAVADEATRAGQYFINHRWLGGTLTNWGTIQKRIARLKEIKRMEEEGTFDVLPKKEVALLNKQRARLEKFLGGIEDMPRIPDVMYVVDPHKEQIAVKEAKKLGIPVVAMVDTNADPDDIDIIIPANDDAIRAVKLITAKLADAIIEGRQGEDADVAFEADTQADSIEEIVEVVEGDNA

SEQ ID NO: 74794 - protein, 346 aa, Streptococcus pyogenes
MAEITAKLVKELREKSGAGVMDAKKALVETDGDMDKAVELLREKGMAKAAKKADRVAAEGLTGVYVHGNVAAVVEVNAETDFVAKNAQFVELVNATAKVIAEGKPANNDEALALVMPSGETLAEAYVNATATIGEKISFRRFALIEKADEQHFGAYQHNGGRIGVISVVEGGDDALAKQVSMHIAAMKPTVLSYTELDAQFIKDELAQLNHAIELDNESRAMVDKPALPFLKYGSKAQLSDDVITAAEADIKAELAAEGKPEKIWDKIIPGKMDRFMLDNTKVDQAYTLLAQVYIMDDSKTVEAYLDSVNAKAIAFARFEVGEGIEKKANDFESEVAATMAAALNN

SEQ ID NO: 74795 - protein, 237 aa, Streptococcus pyogenes
MTKYERIYKDLETKINKDFYKEGDFLPTEIELSQQYQASRDTVRKALSLLTKAGLILKKQGRGTQVIRHHQIMFPISELTSYQELVSYSNLDSKTNVIAIDKLIVDETLSKLTGFSKNSLVWRVTRQRVVEGVASVLDIDYLSKTLVPIMTREIAEHSIYQYLEKELHLAIDFALKEVTIDQITDRDKILLDLGSDQHVVSVKSKVYLSNNNQFQFTESRHKLEKFKFLDFARRRPK

SEQ ID NO: 74796 - protein, 285 aa, Streptococcus pyogenes
MIYPYNSTISLGTVSLNVTDLAKMTTFYTSIIGLQVLSQDTTSRQLTTDGKTVILELRQTPLPGDKAYGLYHTAFLVPDRHSLGLVLNHFLTRSISLEGAADHGHSEAIYLSDPEGNGIEIYHDKAVEHWDIRDNGQIIGVTEPTDTKSILEQLTDIPKHFLLAQDTRIRHVHLSVKNALASSLLYQKVFDLGDKMTIPSASWIASGNYYHHLAFNHWSAPYLKKHQEGAPGLAFLTIHIETPLLFSATLKKARLHGLAILQEDSSSFTTEDEEGIRVNVILGQD

SEQ ID NO: 74797 - protein, 204 aa, Streptococcus pyogenes
MAEKCWNNPKPKEWQAEELSQGRIIDYKAFNFVDGEGVRNSLYVSGCLFHCKGCYNAATWSFKAGMPYTQELEEQIMTDLAQPYVQGLTLLGGEPFLNTGILIPLIKRIRRELPEKDIWSWTGYTWEEMMLETPDKLEMLSLIDILVDGRFDITKKNLMLQFRGSSNQRIIDVQKSLAAKEVIIWDKLNDGDQTFEQISREDLL

SEQ ID NO: 74798 - protein, 311 aa, Streptococcus pyogenes
MLNIGIVGLGAISQKAYLPYMRQLSDITWHLSTRNAAVRQQVGQLFGHAILYSDVKELSKTNLDGVFIHAATSAHAELASLFLNQGIPVFMDKPIADNYLMTKNLYDLAKENQTFLMAGFNRRFTPRVKKLSSLSTKRKVAVEKNDLNRPGDMTFKLFDFFIHPLDTALFLTEGTLLKGHFQYHLEAGLLSQVMVTLMTESMTTTASMNLQSGSRREVMEVQRAEETYHLENLDELSIYKGTEKRVLGFASWDTTLHKRGFETMIDAFLEAISTGVNPVSPESSLLSHWICQQIADSQLSYGELTVELPKD

SEQ ID NO: 74799 - protein, 101 aa, Streptococcus pyogenes
MTHNHENDHQHEVITLVDEQGNETLFEILLTIDGREEFGKNYVLLVPAGSEEDESGEIEIQAYSFTENEDGTEGDLQPIPEDSDAEWDMIEEVFNSFLDEN

SEQ ID NO: 74800 - protein, 139 aa, Streptococcus pyogenes
MRIMGLDVGSKTVGVAISDPLGFTAQGLEIIKIDEEKAEFGFTRLEELVKQYQVEQFVIGLPKNMNNTNGPRVDASITYGNHIEHLFGLPVHYQDERLTTVEAKRMLIEQADISRGKRKKVIDKLAAQLILQNYLNRNF

SEQ ID NO: 74801 - protein, 89 aa, Streptococcus pyogenes
MGFTDETVRFKLDDGDKRQISETLTAVYHSLDEKGYNPINQIVGYVLSGDPAYVPRYNDARNQIRKYERDEIVEELVRYYLQGNGIDVK

SEQ ID NO: 74802 - protein, 378 aa, Streptococcus pyogenes
MAKKLKKNEEITKKFGDERRKALDDALKNIEKDFGKGAVMRLGERAEQKVQVMSSGSLALDIALGAGGYPKGRIIEIYGPESSGKTTVALHAVAQAQKEGGIAAFIDAEHALDPAYAAALGVNIDELLLSQPDSGEQGLEIAGKLIDSGAVDLVVVDSVAALVPRAEIDGDIGDSHVGLQARMMSQAMRKLSASINKTKTIAIFINQLREKVGVMFGNPETTPGGRALKFYASVRLDVRGTTQIKGTGDQKDSSIGKETKIKVVKNKVAPPFKVAEVEIMYGEGISRTGELVKIASDLDIIQKAGAWFSYNGEKIGQGSENAKRYLADHPELFDEIDLKVRVKFGLLEESEEESAMAVASEETDDLALDLDNGIEIED

SEQ ID NO: 74803 - protein, 660 aa, Streptococcus pyogenes
MTNIIELPEVLANQIAAGEVVERPASVVKELVENAIDAKSSQITVEIEESGLKMIQVTDNGEGMSHEDLPLSLRRHATSKIKSQSDLFRIRTLGFRGEALPSVASISKITIKTATKEVTHGSLLIATGGEIETLEAISTPTGTKIKVENLFYNTPARLKYMKSLQAELAHIVDVVNRLSLAHPEVAFTLISDGRQLTQTSGTGDLRQAIAGIYGLNTTKKMLAISNADLDFEVSGYVSLPELTRANRNYMTILVNGRYIKNFLLNRAILDGYGSKLMVGRFPIVVIDIQIDPYLADVNVHPTKQEVRISKERELMALISTAISESLKEQDLIPDALENLAKSSTRHFSKPEQTQLPLQSRGLYYDPQKNDFFVKESAVSEKIPETDFYSGAVDNSVKVEKVELLPHSEEVIGPSSVKHASRPQNTFTETDHPNLDLKNRQKLSQMLTRLENEGQSVFPELDYFGQMHGTYLFAQGKDGLFIIDQHAAQERVKYEYYRDKIGEVDSSLQQLLVPYLFEFSGSDFINLQEKMALLNEVGIFLEVYGHNTFILREHPIWMKEEEIASGVYEMCDMLLLTNEVSIKTYRAELAIMMSCKRSIKANHSLDDYSARNLLLQLAQCQNPYNCPHGRPVLINFSKADMEKMFRRIQENHTSLRELGKY

SEQ ID NO: 74804 - protein, 120 aa, Streptococcus pyogenes
MSAKEQLKELKPLFALITLFEEQRDKDIKLINAFHNPEAIRHIEKGTAKQLLYLAKERDKRLAMIATLQDERQIAVIKARYVDDLSWDEILDKLGYSINTVFKLHRKALEVLDEQEERYS

SEQ ID NO: 74805 - protein, 851 aa, Streptococcus pyogenes
MAKTNISPGMQQYLDIKKDYPDAFLLFRMGDFYELFYEDAVKAAQLLEIGLTSRNKNAENPIPMAGVPHHSAQQYIDVLIELGYKVAVAEQMEDPKQAVGVVKREVVQVITPGTVVDSAKPDSANNFLVAVDFDGCRYGLAYMDVSTGEFCVTDLADFTSVRSEIQNLKAKEVLLGFDLSEEEQTILVKQMNLLLSYEETVYEDKSLIDGQLTTVELTAAGKLLQYVHKTQMRELSHLQALVHYEIKDYLQMSYATKSSLDLVENARTNKKHGSLYWLLDETKTAMGMRLLRSWIDRPLVSKEAILERQEIIQVFLNAFIERTDLSNSLKGVYDIERLSSRVSFGKANPKDLLQLGHTLAQVPYIKAILESFDSPCVDKLVNDIDSLPELEYLIRTAIDPDAPATISEGSIIRNGFDERLDHYRKVMREGTGWIADIEAKERQASGINNLKIDYNKKDGYYFHVTNSNLSLVPEHFFRKATLKNSERYGTAELAKIEGQMLEAREESSSLEYDIFMCIRAQVETYINRLQKLAKILATVDVLQSLAVVAETNHYIRPQFNDNHVITIQEGRHAVVEKVMGVQEYIPNSISFDQQTSIQLITGPNMSGKSTYMRQLALTVIMAQMGSFVAADHVDLPLFDAIFTRIGAADDLISGQSTFMVEMMEANQAIKRASDNSLILFDELGRGTATYDGMALAQAIIEYIHDRVGAKTIFATHYHELTDLSTNLTSLVNVHVATLEKDGDVTFLHKIAEGPADKSYGIHVAKIAGLPKSLLKRADEVLTRLETQSRSTEIISVPSQVESSSAVRQGQLSLFGDEEKAHEIRQALEVIDVMNMTPLQAMTTLYELKKLL

SEQ ID NO: 74806 - protein, 563 aa, Streptococcus pyogenes
MDTKTLIASEIAKVVPELEQDAIFNLLETPKNSDMGDLAFPAFSLAKVLRKAPQMIASELAEQIDESQFEKVVAVGPYINFFLDKAKISSQVLEQVITAGSDYAQQDEGQGRNVAIDMSSPNIAKPFSIGHLRSTVIGDSLAHIFAKMGYKPVKINHLGDWGKQFGMLIVAYKKWGDEAAVQAHPIDELLKLYVRINAEAETDPTVDEEAREWFRKLEDGDKEATELWQWFRDESLLEFNRLYDQLHVTFDSYNGEAFYNDKMDEVLDLLEAKNLLVESKGAQVVNLEKYGIEHPALIKKSDGATLYITRDLAAALYRKRTYDFAKSVYVVGNEQAAHFKQLKAVLKEMGYDWSDDMTHVAFGLVTKGGAKLSTRKGNVILLEPTVAEAINRAASQIEAKNPNLADKEAVAHAVGVGAIKFYDLKTDRMNGYDFDLEAMVSFEGETGPYVQYAHARIQSILRKADFTPSATTTYSLADAESWEIIKLIQDFPRIIKRTSDNFEPSIMAKFAINLAQSFNKYYAHTRILDDNSERDNRLALCYATATVLKEALRLLGVDAPNEM

SEQ ID NO: 74807 - protein, 582 aa, Streptococcus pyogenes
MKRSMYAGRVREEHIGTTITLKGWVSRRRDLGGLIFIDLRDREGVMQLVINPEEVSSDVMATAERLRSEYVIEVEGFVEARQQANDKLATGMVELKVSALTILNTAKTTPFEIKDDVEVSDDTRLRYRYLDLRRPEMLENFKLRAKVTHSIRNYLDDLEFIDVETPMLTKSTPEGARDYLVPSRVSQGHFYALPQSPQITKQLLMNAGFDRYYQIVKCFRDEDLRGDRQPEFTQVDLETSFLSEQEIQDIVEGMIAKVMKETKEIDVTLPFPRMSYDVAMNSYGSDKPDTRFEMLLQDLTVTVKGNDFKVFSEAPAVKAIVVKGNADRYSRKDIDKLTEFAKQFGAKGLAWVKVTDGQLAGPVAKFLTAIETELSSQLKLAENDLVLFVADTLEVANNTLGALRNRIAKDLDMIDQSQFNFLWVVDWPMFEWSEEEGRYMSAHHPFTLPTPESAHELEGDLAKVRAIAYDIVLNGYELGGGSLRINQKEMQERMFKALGFTADEANDQFGFLLEAMDYGFPPHGGLAIGLDRFVMLLAGKDNIREVIAFPKNNKASDPMTQAPSLVSENQLEELSLQIESHD

SEQ ID NO: 74808 - protein, 426 aa, Streptococcus pyogenes
MKLQKPKGTQDILPGDAAKWQYVESVARDTFSQYNYGEIRTPMFEHYEVISRSVGDTTDIVTKEMYDFYDKGDRHITLRPEGTAPVVRSYVENKLFAPEVQKPVKLYYIGSMFRYERPQAGRLREFHQIGVECFGAANPATDVETIAMAYHLFEKLGIKDVTLHLNSLGSPESRAAYRQALIDYLTPMRDQLSKDSQRRLDENPLRVLDSKEKEDKLAVEKAPSILDYLDEESQAHFEAVKDMLEALDIPYVIDTNMVRGLDYYSHTIFEFITSVEGSDLTICAGGRYDSLVGYFGGPETPGFGFGLGLERLLMIIEKQGITLPIETEMDIYLAVLGDGANSKALELVQAIRRQGFTAERDYLGRKIKAQFKSADTFKAKLVMTLGESEVEAGKAVIKNNRSRQEVEVSFEDMMTNFANISEQLLS

SEQ ID NO: 74809 - protein, 49 aa, Streptococcus pyogenes
MRVNITLEHKESGERLYLTSKNKRNTPDRLQLKKYSPKLRKHVTFTEVK

SEQ ID NO: 74810 - protein, 112 aa, Streptococcus pyogenes
MKKDSICQVGVINQQNVTTATNYLEKEKVQKSLRILSKFTDNKQINIIFYLLAVEELCVCDIACLLNLSMASASHHLRKLANQNILDTRREGKIIYYFIKDEEIRDFFNQLG

SEQ ID NO: 74811 - protein, 213 aa, Streptococcus pyogenes
MKDLLKQYQAKPLGEEKRYAVFLPLILVNDDWHVLYEVRSQHISQPGEVSFPGGQVENQETLQEAAIRETVEELTVDASQIQLWGEIDYLVQSSRTIHCFVGQLVVDDWKSIQPNEEVDKVFIVPLRQLLFTDPVYYRLEVTPIETTDFPFDRIRNGKYYQFSQEYRSIPFYENLEETIWGMTAQFTKCLTDILNDESIAKKNPSDIEKSKGR

SEQ ID NO: 74812 - protein, 195 aa, Streptococcus pyogenes
MTRTEYLAELDKYLRKLPREDYHEAMEYYIEYFDEAGPDKESQVIDDLGNPKEAASEIISNVLGKHLATPEKTPKNRATIIGLTILSLFAAPIALPVLLALILFIIACLMLGLTAIFAAYIFGLAGILVAGVTLFESLTLIGSSIPAQAMGIGSALLCFGGGLLIWIIATAFLRFSGRAFVAFIKWISNKKGAQA

SEQ ID NO: 74813 - protein, 757 aa, Streptococcus pyogenes
MLEELKTLIKNPKLMITMIGVALVPALYNLSFLGSMWDPYGRVNDLPIAVVNHDKPAKRADKSLTIGNDMVDKMSKSKDLEYHFVSAKQAQEGLKEGDYYMVITLPEDLSQRAATLLNPEPQKLTIRYQTSKGHGMVAAKMGETAMAKLKESVSQNITKTYTSAVFSSMTDLQSGLKEASAGSQALASGAKTAQAGSQTLSTNLAALTGASQQFQQGTGRLTSGLTTYTDGVNQVKNGLGTLSTDIPNYLNGVSRLSQGASQLNQGLSQLTQATTLSDEKAKGIQSLIVGLPVLNQGIQQLNTELSTLQPPNLNADELGNSLGAIAQAAKQVIAEETAAQNEELSALQATSVYQSLTAEQQGELAAALSQSDKSQTVSAAQTILSSVQTLSTSLQSLSQEDQSKQLEQLKEAVAQIANQSNQALPGASSALTELSTGLAKVNGSLNQQVLPGSNQLTTGLAQLNRYNTAIGSGVIKLSEGANALSSKSGELLDGSHQLSEGATKLADGSSQLSQGGHQLTSGLTELSTGLSTLNGSLAKASQQLSLVSVTDKNAKAVAKPLVLNEKDKDGVKTNGIGMAPYMIAVSLMVVALSTNVIFANSLSGRPVKDKWDWAKQKFVINGFISTMGSIVLYLAIQLLGFEARYGMETLGFIMLSGWTFMALVTALVGWDDRYGSFASLVMLLLQVGSSGGSYPIELSGAFFQKLHPFLPMTYVVSGLRQTISLSGHIGVEVKVLTGFLLAFMVLALLIYRPKKTV

SEQ ID NO: 74814 - protein, 203 aa, Streptococcus pyogenes
MSRYTGPSWKQSRRLGLSLTGTGKELARRNYVPGQHGPNNRSKLSEYGLQLAEKQKLRFSYGLGEKQFRNLFVQATKIKEGTLGFNFMVLLERRLDNVVYRLGLATTRRQARQFVNHGHILVDGKRVDIPSYRVDPGQVISVREKSMKVPAILEAVEATLGRPAFVSFDAEKLEGSLTRLPERDEINPEINEALVVEFYNKML

SEQ ID NO: 74815 - protein, 455 aa, Streptococcus pyogenes
MRLPEVAELRVQPQDLLAEQSVLGSIFISPDKLIAVREFISPDDFYKYAHKIIFRAMITLSDRNDAIDATTIRTILDDQDDLQSIGGLSYIVELVNSVPTSANAEYYAKIVAEKAMLRDIIARLTESVNLAYDEILKPEEVIAGVERALIELNEHSNRSGFRKISDVLKVNYEALEARSKQTSNVTGLPTGFRDLDKITTGLHPDQLVILAARPAVGKTAFVLNIAQNVGTKQKKTVAIFSLEMGAESLVDRMLAAEGMVDSHSLRTGQLTDQDWNNVTIAQGALAEAPIYIDDTPGIKITEIRARSRKLSQEVDGGLGLIVIDYLQLITGTKPENRQQEVSDISRQLKILAKELKVPVIALSQLSRGVEQRQDKRPVLSDIRESGSIEQDADIVAFLYRDDYYRKECDDAEEAVEDNTIEVILEKNRAGARGTVKLMFQKEYNKFSSIAQFEER

SEQ ID NO: 74816 - protein, 150 aa, Streptococcus pyogenes
MKVIFLADVKGKGKKGEIKEVPTGYAQNFLIKKNLAKEATSQSIGELKGKQKAEEKAQAEILAEAQAVKAVLDEDKTRVQFQEKVGPDGRTFGSITAKKISEELQKQFGVKVDKRHIVLDHPIRAIGLIEVPVKLHKEVTAEIKLAITEA

SEQ ID NO: 74817 - protein, 658 aa, Streptococcus pyogenes
MKKFRFETIHLIMMGLILFGLLALCVSIMQSKILILLAIFLVLLFVVALLWYQKEAYQLSDLAHIELLNEQTEDNLKTLLDNMPVGVVQFDQETNAVEWYNPYAELIFTTEEGFIQNGLIQQIITEKRREDISQTFEVSGNKYTSYIDVSSGIFYFFDSFVGNRQLADASMLRPVVGIISVDNYDDITDDLSDADTSKINSFVANFIDEFMESKRIFYRRVNMDRYYFFTDFKTLNDLMDNKFSVLEEFRKEAQDAQRPLTLSIGISFGEENHSQIGQVALENLNIALVRGGDQIVIRENADHTNPIYFGGGSVSTVKRSRTRTRAMMTAISDRIKMVDNVFIVGHRKLDMDALGSAVGMQFFAGNIIENSFAVYNPDEMSPDIERAIERLQADGKTRLISVSQAMGLVTPRSLLVMVDHSKISLTLSKEFYEQFQNVIVVDHHRRDDDFPDNAILTFIESGASSAAELVTELIQFQNAKKCLNKIQASVLMAGIMLDTKNFSTRVTSRTFDVASYLRSKGSDSVEIQNISATDFEEYKQINEIILQGERLGDSIIVAAGEKNHLYSNVIASKAADTILSMAHVEASFVLVETASHKIAISARSRSKINVQRVMEKLGGGGHFNLAACQLTDISLPQAKYLLLKTINMTMKETGEVES

SEQ ID NO: 74818 - protein, 632 aa, Streptococcus pyogenes
MTHEFTESYDVIVIGAGHAGVEASLATSRMGCKTLLATINLDMLAFMPCNPSIGGSAKGIVVREIDALGGEMGKNIDKTYIQMKMLNTGKGPAVRALRAQADKSLYAREMKHTVEKQANLTLRQTMIDDILVEDGRVVGVLTATGQKFAAKAVVVTTGTALRGEIILGELKYSSGPNNSLASVTLADNLKKLGLEIGRFKTGTPPRVKASSINYDQTEIQPGDDKPNHFSFMSKDADYLKDQIPCWLTYTNQTSHDIINQNLYRAPMFSGIVKGVGPRYCPSIEDKIVRFADKERHQLFLEPEGRDTEEVYVQGLSTSLPEDVQKDLIHSIKGLEKAEMMRTGYAIEYDIVLPHQLRATLETKLISGLFTAGQTNGTSGYEEAAGQGLIAGINAALKVQGKPELILKRSDAYIGVMIDDLVTKGTLEPYRLLTSRAEYRLILRHDNADMRLTEIGRDIGLVDDERWKAFEIKKNQFDNELKRLNSIKLKPIKETNDRVQDLGFKPLTDAMTAKEFMRRPEIDYATAVSFVGPAAEDLDAKIIELLETEIKYEGYIRKALDQVAKMKRMEEKRIPTNIDWDAIDSIATEARQKFKKINPETIGQASRISGVNPADISILMIYLEGNGKAHRKY

SEQ ID NO: 74819 - protein, 373 aa, Streptococcus pyogenes
MTDNSKIRVVVGMSGGVDSSVTALLLKEQGYDVIGVFMKNWDDTDEFGVCTATEDYKDVAAVADKIGIPYYSVNFEKEYWDRVFEYFLAEYRAGRTPNPDVMCNKEIKFKAFLDYAMTLGADYVATGHYAQVKRDENGTVHMLRGADNGKDQTYFLSQLSQEQLQKTLFPLGHLQKSEVREIAERAGLATAKKKDSTGICFIGEKNFKQFLSQYLPAQKGRMMTIDGRDMGEHAGLMYYTIGQRGGLGIGGQHGGDNQPWFVVGKDLSQNILYVGQGFYHEALMSNSLDASVIHFTREMPEEFTFECTAKFRYRQPDSHVAVHVRGDKAEVVFAEPQRAITPGQAVVFYDGKECLGGGMIDMAYKNGQPCQYI

SEQ ID NO: 74820 - protein, 266 aa, Streptococcus pyogenes
MDKLILGRYIPGDSLIHRLDPRSKLLAMIIYIVIIFWANNVVTNLLMLTFTLAVVFLSKIKLSFFLNGVKPMIGIILFTTLFQMFFSQGGKVIFSWWFISITDLGLSQAILIFMRFVLIIFFSTLLTLTTTPLSLSDAVESLLKPLTRFKVPAHEIGLMLSLSLRFVPTLMDDTTRIMNAQRARGVDFGEGNLIQKVKSIIPILIPLFASSFKRADALAIAMEARGYQGGEGRTKYRQLDWQLKDSLAIGIVSLLGLLLFFLKTSL

SEQ ID NO: 74821 - protein, 280 aa, Streptococcus pyogenes
MSINLQNVSYTYQAGTPFEGRALFNINLDILDGSYTAFIGHTGSGKSTIMQLLNGLHVPTTGIVSVDKQDITNHSKNKEIKSIRKHVGLVFQFPESQLFEETVLKDVAFGPQNFGVSPEEAEALAREKLALVGISENLFEKNPFELSGGQMRRVAIAGILAMQPKVLVLDEPTAGLDPKGRKELMTIFKKLHQSGMTIVLVTHLMDDVANYADFVYVLDKGKIILSGKPKTIFQQVSLLEKKQLGVPKVTKLAQRLVDRGIPISSLPITLEELREVLKHG

SEQ ID NO: 74822 - protein, 296 aa, Streptococcus pyogenes
MIILKEQAFFLRIRLNNMSAIIELKKVTFNYHKDQEKPTLDGVSFHVKQGEWLSIIGHNGSGKSTTIRLIDGLLEPESGSIIVDGDLLTITNVWEIRHKIGMVFQNPDNQFVGATVEDDVAFGLENKGIAHEDIKERVNHALELVGMQNFKEKEPARLSGGQKQRVAIAGAVAMKPKIIILDEATSMLDPKGRLELIKTIKNIRDDYQLTVISITHDLDEVALSDRVLVMKDGQVESTSTPEQLFARGDELLQLGLDIPFTTSVVQMLQEEGYPVDYGYLTEKELENQLCQLISKM

SEQ ID NO: 74823 - protein, 180 aa, Streptococcus pyogenes
MIKKENIPNLLTLVRIAMIPFFLFITSSSNKVGWHIFAAVIFAIASFTDYLDGYLARKWHVASNFGKFADPLADKMLVMSAFIMLVGLGLVPAWVSAVIICRELAVTGLRLLLVETGGKVLAAAMPGKIKTATQMLSIILLLCHWIFLGNVLLYIALFFTIYSGYDYFKGASFLFKDTFK

SEQ ID NO: 74824 - protein, 341 aa, Streptococcus pyogenes
MSEKSLGEVLRESRVGKNITLDDIELKTGISSHYLLAMELDQFKIIPEEKFDQFLKEYADIVELDFNTLKRRYRYQVNSKKDSDIKSVTEIVEEKLSKKRLQEKLLSHQSMGYGQPLEVSKNKETLVIPVKTVGLDSKSPLKTISPVSQFKSDNRLIPKKNVSRMRRNSTDSRSKTSLFPIVILGTIAFAIISVIILGVWQQFEKSQRAKEAEVALLKASEQSTNGLKNNSNDRKTQVTTEGSGNYLIATVTKSKETVDISVSLTEAQSSWISLTNSEIGEGGITLTQDSPTYTATLPAEITESLLTLGVTKGVSVTIDGQPVDLSPLTSTDLSYITFKIQ

SEQ ID NO: 74825 - protein, 429 aa, Streptococcus pyogenes
MTKLVKINYPNIDEDLYYVKLENGLTVYFIKKIGFLEKTAMLTVGFGSLDNKLTVDDESRDAPAGIAHFLEHKLFEDESGGDISLKFTQLGAETNAFTTFNQTSFFFSTASKFQENLELLQYFVLSANITDESVSREKKIIGQEIDMYQDDADYRAYSGILQNLFPKTSLANDIAGSKASIQKITKILLETHHTYFYQPTNMSLFIVGDIDIDETFLAIQRFQTTLSYPDRKRVTVDPLHYYPVIKSSSVDMDVTTAKLVVGFRGYLTLTQHSLLTYRIALKLFLSMLIGWTSKIYHTLYEDGKIDDSFDVDVEIHHNFQFVLISLDTPEPIAMSNYIRQKLATIKISKEFTNEHLNLLKKEMYGDFIQSLDSIEHLTHQFSLYLSDSDKETYFDIPKIIERLTLKDVVTIGKAFFEKADASDFTVFPK

SEQ ID NO: 74826 - protein, 419 aa, Streptococcus pyogenes
MPIFKKTLIVLSFIFLISILIYLNMYLFGTSTVGIYGVILITYLVIKLGLSFLYEPFKGKPHDYKVAAVIPSYNEDAESLLETLKSVLAQTYPLSEIYIVDDGSSNTDAIQLIEEYVNREVDICRNVIVHRSLVNKGKRHAQAWAFERSDADVFLTVDSDTYIYPNALEELLKSFNDETVYAATGHLNARNRQTNLLTRLTDIRYDNAFGVERAAQSLTGNILVCSGPLSIYRREVIIPNLERYKNQTFLGLPVSIGDDRCLTNYAIDLGRTVYQSTARCDTDVPFQLKSYLKQQNRWNKSFFKESIISVKKILSNPIVALWTIFEVVMFMMLIVAIGNLLFNQAIQLDLIKLFAFLSIIFIVALCRNVHYMIKHPASFLLSPLYGILHLFVLQPLKLYSLCTIKNTEWGTRKKVTIFK

SEQ ID NO: 74827 - protein, 402 aa, Streptococcus pyogenes
MKIAVAGSGYVGLSLGVLLSLQNEVTIVDILPSKVDKINNGLSPIQDEYIEYYLKSKQLSIKATLDSKAAYKEAELVIIATPTNYNSRINYFDTQHVETVIKEVLSVNSHATLIIKSTIPIGFITEMRQKFQTDRIIFSPEFLRESKALYDNLYPSRIIVSCEENDSPKVKADAEKFALLLKSAAKKNNVPVLIMGASEAEAVKLFANTYLALRVAYFNELDTYAESRKLNSHMIIQGISYDDRIGMHYNNPSFGYGGYCLPKDTKQLLANYNNIPQTLIEAIVSSNNVRKSYIAKQIINVLEERESPVKVVGVYRLIMKSNSDNFRESAIKDVIDILKSKDIKIIIYEPMLNKLESEDQSVLVNDLENFKKQANIIVTNRYDNELQDVKNKVYSRDIFNRD

SEQ ID NO: 74828 - protein, 304 aa, Streptococcus pyogenes
MTKVRKAIIPAAGLGTRFLPATKALAKEMLPIVDKPTIQFIVEEALKSGIEEILVVTGKAKRSIEDHFDSNFELEYNLQAKGKNELLKLVDETTAINLHFIRQSHPRGLGDAVLQAKAFVGNEPFVVMLGDDLMDITNASAKPLTKQLMEDYDKTHASTIAVMKVPHEDVSSYGVIAPQGKAVKGLYSVDTFVEKPQPEDAPSDLAIIGRYLLTPEIFGILERQTPGAGNEVQLTDAIDTLNKTQRVFAREFKGNRYDVGDKFGFMKTSIDYALEHPQVKEDLKNYIIKLGKALEKSKVPTHSK

SEQ ID NO: 74829 - protein, 340 aa, Streptococcus pyogenes
MTKPIILTGDRPTGKLHLGHYVGSLKNRVFLQNENKYKMFVFLADQQALTDHAKESELIQESIGNVALDYLSVGLDPKQSTIFIQSQIPELAELSMYYMNLVSLARLERNPTVKTEIAQKGFGESIPSGFLVYPVSQAADITAFKANLVPVGNDQKPMIEQTREIVRSFNHTYHTDCLVEPEGIYPENEKAGRLPGLDGNAKMSKSLGNGIYLSDDADTVRKKVMSMYTDPNHIKIEDPGQIEGNMVFHYLDIFARKEDQADIEAMKEHYQIGGLGDVKTKRYLLDILERELAPIRERRLEYAKDMGEVFRMLQEGSQKARTVAAKTLSEVKSAMGINYF

SEQ ID NO: 74830 - protein, 539 aa, Streptococcus pyogenes
MLTVSDVSLRFSDRKLFDDVNIKFTAGNTYGLIGANGAGKSTFLKILAGDIEPSTGHISLGPDERLSVLRQNHFDYEEERAIDVVIMGNEQLYNIMKEKDAIYMKADFSEEDGVRAAELEGIFAELGGWEAESEASQLLQNLNIPEDLHYQNMSELANGDKVKVLLAKALFGKPDVLLLDEPTNGLDIQSISWLEDFLIDFENTVIVVSHDRHFLNKVCTHMADLDFGKIKLFVGNYDFWKQSSELAARLQADRNAKAEEKIKELQEFVARFSANASKSKQATSRKKMLDKIELEEIVPSSRKYPFINFKAEREMGNDFLTVENLSVTIDGEKIIDNISFILRPGDKAAIIGQNDIQTTALMRALADDIDYEGTIKWGVTTSRSYLPKDNSKDFATEESILEWLRQFASKGEDDDTFLRGFLGRMLFSGDEVKKSVNVLSGGEKVRVMLSKLMLLKSNVLILDDPTNHLDLESISSLNDGIKDFKESVIFASHDHEFIQTIANHIVVISKNGVIDRIDETYDEFLDNPEVQARVAELWK

SEQ ID NO: 74831 - protein, 159 aa, Streptococcus pyogenes
MKVKLICVGKLKERYLKDGISEYQKRLSRFCQFEMIELTDERTPDKASFADNQLIMSKEAQRIHKKIGERDFVIALAIEGKQFPSETFSELISGVTVKGYSTITFIIGGSLGLDSIIKKRANMLMSFGLLTLPHQLMRLVLTEQIYRAFMITQGSPYHK

SEQ ID NO: 74832 - protein, 407 aa, Streptococcus pyogenes
MPSMKHILKSLSILLIGFLGGLIAIITFNNLYPHSPSKINSGKATTSNMVFNNTTNTTKAVKAVQNAVVSVINYQDNPSSSLSNPYTKLFGEGRSKENKDAELSIFSEGSGVIYRKDGNSAYVVTNNHVIDGAKRIEILMADGSKVVGELVGADTYSDLAVVKISSDKIKTVAEFADSTKLNVGEVAIAIGSPLGTQYANSVTQGIVSSLSRTVTLKNENGETVSTNAIQTDAAINPGNSGGPLINIEGQVIGINSSKISSTPTGSNGNSGAVEGIGFAIPSTDVIKIIKQLETNGEVIRPALGISMVNLNDLSTNALSQINIPTSVTGGIVVAEVKEGMPASGKLAQYDVITEIDGKTVNSISDLQSSLYGHDINDTIKVTFYRGTTKKKADIKLTKTTQDLTKTQ

SEQ ID NO: 74833 - protein, 229 aa, Salmonella typhimurium
MARRILVVEDEAPIREMVCFVLEQNGFQPVEAEDYDSAVNKLNEPWPDLILLDWMLPGGSGLQFIKHLKREAMTRDIPVVMLTARGEEEDRVRGLETGADDYITKPFSPKELVARIKAVMRRISPMAVEEVIEMQGLSLDPGSHRVMTGDSPLDMGPTEFKLLHFFMTHPERVYSREQLLNHVWGTNVYVEDRTVDVHIRRLRKALEHSGHDRMVQTVRGTGYRFSTRF

SEQ ID NO: 74834 - protein, 431 aa, Salmonella typhimurium
VLERLSWKRLVLELVLCCIPALILSAFFGYLPWFLLAAVTGLLVWHFWNLLRLSWWLWVDRSMTPPPGRGSWEPLLYGLHQMQLRNKKRRRELGNLIKRFRSGAESLPDAVVLTTEEGGIFWCNGLAQQILGLRWPDDNGQNILNLLRYPEFTQYLKTRDFTRPLHLVLNTGRHLEIRVMPYTDKQLLMVARDVTQMHQLEGARRNFFANVSHELRTPLTVLQGYLEMMQEQALEGATREKALHTMREQTYRMEGLVKQLLTLSKIEAAPALLLNEKVDVPMMLRVVEREAQTLSQQKHTFTFEVDDSLSVLGNEEQLRSAISNLVYNAVNHTPAGTHITVSWRRVAHGAEFCIQDNGPGIAAEHIPRLTERFYRVDKARSRQTGGSGLGLAIVKHALNHHESRLEIDSSPGKGTRFSFVLPERLIAKNSD

SEQ ID NO: 74835 - protein, 439 aa, Salmonella typhimurium
MTHQLKSRDIIALGFMTFALFVGAGNIIFPPMVGLQAGEHVWTAAIGFLITAVGLPVLTVVALAKVGGGVDSLSTPIGKVAGLLLATVCYLAVGPLFATPRTATVSFEVGIAPLTGDSAMPLLIYSVVYFAIVILVSLYPGKLLDTVGNFLAPLKIIALVILSVAAIVWPAGPISNALDAYQNAAFSNGFVNGYLTMDTLGAMVFGIVIVNAARSRGVTEARLLTRYTVWAGLMAGVGLTLLYLALFRLGSDSATLVDQSANGAAILHAYVQHTFGGAGSFLLAALIFIACLVTAVGLTCACAEFFAQYIPLSYRTLVFILGGFSMVVSNLGLSHLIQISIPVLTAIYPPCIALVVLSFTRSWWHNSTRIIAPAMFISLLFGILDGIKASAFGDMLPAWSQRLPLAEQGLAWLMPTVVMVILAIIWDRAAGRQVTSSAH

SEQ ID NO: 74836 - protein, 456 aa, Salmonella typhimurium
MESNNKLKRGLSTRHIRFMALGSAIGTGLFYGSADAIKMAGPSVLLAYIIGGVAAYIIMRALGEMSVHNPAASSFSRYAQENLGPLAGYITGWTYCFEILIVAIADVTAFGIYMGVWFPAVPHWIWVLSVVLIICAINLMSVKVFGELEFWFSFFKVATIIIMIVAGIGIIVWGIGNGGQPTGIHNLWSNGGFFSNGWLGMIMSLQMVMFAYGGIEIIGITAGEAKDPEKSIPRAINSVPMRILVFYVGTLFVIMSIYPWNQVGTNGSPFVLTFQHMGITFAASILNFVVLTASLSAINSDVFGVGRMLHGMAEQGSAPKVFAKTSRRGIPWVTVLVMTIALLFAVYLNYIMPENVFLVIASLATFATVWVWIMILLSQIAFRRRLPPEEVKALKFKVPGGVVTTIAGLIFLVFIIALIGYHPDTRISLYVGFAWIVLLLIGWIFKRRRDRQLAQA

SEQ ID NO: 74837 - protein, 605 aa, Salmonella typhimurium
MLNAWHLPVAPFVKQHNDKLTITLWLSGENPPSRVTLRSEFDNEEISLAMRKQRRQPQPGVTAWRATLNIALGQPRRRYSFKLLWHDRQLWFTPQGFSRFPPARLEQFAVDVPDSGPQWVADQIFYQIFPDRFARSQSREAGQDRVYYHHAAGQEIVLRDWDDPLTPQAGGSTFYGGCLNGICEKLPYLKKLGVTALYLNPVFTAPSVHKYDTEDYRHVDPQFGGDRALLRLRRKTQVQGMRLVLDGVFNHSGDSHVWFDRHNRSTGGACHHPDSPWRDWYSFSPQGVALDWLGYPSLPKLDYQSETLVDEIYRGEDSIVRHWLKAPWNMDGWRLDVVHMLGEAGGARHNLQHVAGITRAAKEAQPEAYIVGEHFGDARQWLQADAEDAAMNYRGFTFPLWGFLANTDIAYEPQHIDARTCIAWMDNYRAGLSHQQQLRMFNQLDSHDTARFKTLLGKDAARLPLAVVWLFTWPGVPCIYYGDEVGVDGANDPMCRKPFPWDERKQDGNLLALYQRMAKLRQSSLALRRGGCQALYAEGDVVVFVRVYQQQRALVAINRGEACEVALEALPLLNVAGWQCKTGSGDIREGRLSLPAISATVWMNR

SEQ ID NO: 74838 - protein, 820 aa, Salmonella typhimurium
MRVLKFGGTSVANAERFLRVADILESNARQGQVATVLSAPAKITNHLVAMIEKTIGGQDALPNISDAERIFSDLLAGLASAQPGFPLARLKMVVEQEFAQIKHVLHGISLLGQCPDSINAALICRGEKMSIAIMAGLLEARGHRVTVIDPVEKLLAVGHYLESTVDIAESTRRIAASQIPADHMILMAGFTAGNEKGELVVLGRNGSDYSAAVLAACLRADCCEIWTDVDGVYTCDPRQVPDARLLKSMSYQEAMELSYFGAKVLHPRTITPIAQFQIPCLIKNTGNPQAPGTLIGASSDDDNLPVKGISNLNNMAMFSVSGPGMKGMIGMAARVFAAMSRAGISVVLITQSSSEYSISFCVPQSDCARARRAMQDEFYLELKEGLLEPLAVTERLAIISVVGDGMRTLRGISAKFFAALARANINIVAIAQGSSERSISVVVNNDDATTGVRVTHQMLFNTDQVIEVFVIGVGGVGGALLEQLKRQQTWLKNKHIDLRVCGVANSKALLTNVHGLNLDNWQAELAQANAPFNLGRLIRLVKEYHLLNPVIVDCTSSQAVADQYADFLREGFHVVTPNKKANTSSMDYYHQLRFAAAQSRRKFLYDTNVGAGLPVIENLQNLLNAGDELQKFSGILSGSLSFIFGKLEEGMSLSQATALAREMGYTEPDPRDDLSGMDVARKLLILARETGRELELSDIVIEPVLPNEFDASGDVTAFMAHLPQLDDAFAARVAKARDEGKVLRYVGNIEEDGVCRVKIAEVDGNDPLFKVKNGENALAFYSHYYQPLPLVLRGYGAGNDVTAAGVFADLLRTLSWKLGV

SEQ ID NO: 74839 - protein, 309 aa, Salmonella typhimurium
MVKVYAPASSANMSVGFDVLGAAVTPVDGTLLGDVVSVEAADHFRLHNLGRFADKLPPEPRENIVYQCWERFCQALGKTIPVAMTLEKNMPIGSGLGSSACSVVAALVAMNEHCGKPLNDTRLLALMGELEGRISGSIHYDNVAPCFLGGMQLMIEENGIISQQVPGFDEWLWVLAYPGIKVSTAEARAILPAQYRRQDCIAHGRHLAGFIHACYSRQPQLAAALMKDVIAEPYRARLLPGFSQARQAVSEIGALASGISGSGPTLFALCDKPETAQRVADWLSKHYLQNQEGFVHICRLDTAGARVVG

SEQ ID NO: 74840 - protein, 205 aa, Salmonella typhimurium
MMRKPSQIVHCISCDLSCQLFPDSAVRVQYCHNAAFSIWPDGNAFLKKGFIEKLLLDRHNHLSSGFIFVDFSFPNLRRFTDLQWADSLADSGMHIVLISDRSLTPLANYWILKSNKIQGIIYSDDDDIVQQQKMHRLFTGRLANSKRGRTLNYTEFILLKRFVSGISIQQIVNIDNIDIKKLYVHKLRLENKLGHSIHKIISNIL

SEQ ID NO: 74841 - protein, 428 aa, Salmonella typhimurium
MKLYNLKDHNEQVSFAQAVTQGLGKQQGLFFPHDLPEFSLTEIDEMLNQDFVSRSAKILSAFIGDEIPQQILEERVRAAFAFPAPVAQVESDVGCLELFHGPTLAFKDFGGRFMAQMLTHISGDKPVTILTATSGDTGAAVAHAFYGLENVRVVILYPRGKISPLQEKLFCTLGGNIETVAIDGDFDACQALVKQAFDDEELKTALGLNSANSINISRLLAQICYYFEAVAQLPQGARNQLVISVPSGNFGDLTAGLLAKSLGLPVKRFIAATNVNDTVPRFLHDGKWAPKATQATLSNAMDVSQPNNWPRVEELFRRKIWRLTELGYAAVDDTTTQQTMRELKAKGYISEPHAAVAYRALRDQLNPGEYGLFLGTAHPAKFKESVESILGETLALPEALAERADLPLLSHHLPADFAALRKLMMTRQ

SEQ ID NO: 74842 - protein, 955 aa, Salmonella typhimurium
MPTPQNYSFIAIAVSAALASMVFPSQAAWVDVDSLPSSGLVSQLPPELQAIIPAQASTGFTKVGTMPNYVYQWNTGTIPVYGNGLTLNGPGAEAFEHTVTVIQNSGTGSPGVIFGNDLTIRTQSANAANNGRDVDGIRTHGANTPDNPVFIITGDRTRIYVDGQDGDGINAGYNSLGQGWTGSANIYVGDDLYIKTTGSQGRGITANAMRDASRAKNTIVVGNRAHIVTTGDSSEGLRTGQSGSLIRLGDDATIETSGASSTGIYAASSSRTELGNNATITVNGASAHAVYATNATVNLGENATISVNSASKAASYSKAPAGLYALSRGAINLAGGAAITMAGDNSSESYAISTETGGIVDGSSGGRFVIDGDIRAAGATAASGTLPQQNSTIKLNMTDNSRWDGASYITSATAGTGVISVQMSDATWNMTSSSTLTDLTLNSGATINFSHEDGEPWQTLTINEDYVGNGGKLVFNTVLNDDDSETDRLQVLGNTSGNTFVAVNNIGGAGAQTIEGIEIVNVAGNSNGTFEKASRIVAGAYDYNVVQKGKNWYLTSYIEPDEPIIPDPVDPVIPDPVVPDPVDPDPVDPVIPDPVIPDPVDPDPVDPEPVDPVIPDPTIPDIGQSDTPPITEHQFRPEVGSYLANNYAANTLFMTRLHDRLGETQYTDMLTGEKKVTSLWMRNVGAHTRFNDGSGQLKTRINSYVLQLGGDLAQWSTDGLDRWHIGAMAGYANSQNRTLSSVSDYHSRGQVTGYSVGLYGTWYANNIDRSGAYVDTWMLYNWFDNKVMGQDQAAEKYKSKGITASVEAGYSFRLGESAHQSYWLQPKAQVVWMGVQADDNREANGTLVKDDTAGNLLTRMGVKAYINGHNAIDNDKSREFQPFVEANWIHNTQPASVKMDDVSSDMRGTKNIGELKVGIEGQVTPRLNVWGNVAQQVGDTGYSDTQGMLGMKYSF

SEQ ID NO: 74843 - protein, 317 aa, Salmonella typhimurium
MTDKLTSLRQFTTVVADTGDIAAMKLYQPQDATTNPSLILNAAQIPEYRKLIDDAVAWAKQQSSDRAQQVVDATDKLAVNIGLEILKLVPGRISTEVDARLSYDTEASIAKAKRIIKLYNDAGISNDRILIKLASTWQGIRAAEQLEKEGINCNLTLLFSFAQARACAEAGVYLISPFVGRILDWYKANTDKKDYAPAEDPGVVSVTEIYEYYKQHGYETVVMGASFRNVGEILELAGCDRLTIAPALLKELAESEGAIERKLSFSGEVKARPERITEAEFLWQHHQDPMAVDKLADGIRKFAVDQEKLEKMIGDLL

SEQ ID NO: 74844 - protein, 196 aa, Salmonella typhimurium
MDTLRIGLVSISDRASSGVYQDKGIPALEEWLASALTTPFEVQRRLIPDEQEIIEQTLCELVDEMSCHLVLTTGGTGPARRDVTPDATLAIADREMPGFGEQMRQISLRFVPTAILSRQVGVIRKQALILNLPGQPKSIKETLEGVKADDGSVSVPGIFASVPYCIQLLDGPYVETAPEVVAAFRPKSARRENMSD

SEQ ID NO: 74845 - protein, 231 aa, Salmonella typhimurium
MSALCPLLTPPASEALLLAQARQLSGYTLGELAAMAGITTPKDLKRDKGWIGVLLEIWLGASAGSKPEQDFAALGVELKTIPVDSLGRPLETTFVCVAPLTGNSGVTWETSHVRHKLKRVLWVPVEGDRSIPLAERRVGSPLLWSPSEEEDRQLRLDWEELMDMIVLGQVERITARHGEVLQLRPKAANARALTEAIGARGEPILTLPRGFYLKKNFTQALLARHFLLQNP

SEQ ID NO: 74846 - protein, 638 aa, Salmonella typhimurium
MGKIIGIDLGTTNSCVAIMDGTQARVLENAEGDRTTPSIIAYTQDGETLVGQPAKRQAVTNPQNTLFAIKRLIGRRFQDEEVQRDVSIMPYKIIGADNGDAWLDVKGQKMAPPQISAEVLKKMKKTAEDYLGEPVTEAVITVPAYFNDAQRQATKDAGRIAGLEVKRIINEPTAAALAYGLDKEVGNRTIAVYDLGGGTFDISIIEIDEVDGEKTFEVLATNGDTHLGGEDFDTRLINYLVDEFKKDQGIDLRNDPLAMQRLKEAAEKAKIELSSAQQTDVNLPYITADATGPKHMNIKVTRAKLESLVEDLVNRSIEPLKVALQDAGLSVSDINDVILVGGQTRMPMVQKKVAEFFGKEPRKDVNPDEAVAIGAAVQGGVLTGDVKDVLLLDVTPLSLGIETMGGVMTPLITKNTTIPTKHSQVFSTAEDNQSAVTIHVLQGERKRASDNKSLGQFNLDGINPAPRGMPQIEVTFDIDADGILHVSAKDKNSGKEQKITIKASSGLNEEEIQKMVRDAEANAESDRKFEELVQTRNQGDHLLHSTRKQVEEAGDKLPADDKTAIESALNALETALKGEDKAAIEAKMQELAQVSQKLMEIAQQQHAQQQAGSADASANNAKDDDVVDAEFEEVKDKK

SEQ ID NO: 74847 - protein, 354 aa, Salmonella typhimurium
MRVTDFSFELPESLIAHYPQPERSRCRLLSLEGPTGALTHGTFTDLLDKLNPGDLLVFNNTRVIPARLFGRKASGGKIEVLVERMLDDKRILAHIRASKAPKPGTELLLGDDESIHATMTARHGALFEVEFNDPRPVLDILNAIGHMPLPPYIDRPDEDADRELYQTVYSEKPGAVAAPTAGLHFDEPLLAALREKGVEMAFVTLHVGAGTFQPVRVDTIEDHIMHSEYAEVPQEVVDAVLAAKARGNRVIAVGTTSVRSLESAAQAAKSDLIEPFFGDTQIFIYPGYQYKVIDALITNFHLPESTLIMLVSAFAGYQHTMNAYKTAVEQKYRFFSYGDAMFITYNPQAISERP

SEQ ID NO: 74848 - protein, 375 aa, Salmonella typhimurium
MKFELDTTDGRARRGRLVFDRGVVETPAFMPVGTYGTVKGMTPEEVEATGAQIILGNTFHLWLRPGQEIMKLHGDLHDFMQWKGPILTDSGGFQVFSLGDIRKITEQGVHFRNPINGDPIFLDPEKSMEIQYDLGSDIVMIFDECTPYPADWDYAKRSMEMSLRWAKRSRDRFDSLGNKNALFGIIQGSVYEDLRDISVKGLVEIGFDGYAVGGLAVGEPKADMHRILEHVCPQIPADKPRYLMGVGKPEDLVEGVRRGIDMFDCVMPTRNARNGHLFVTDGVVKIRNAKHKSDTSPLDAECDCYTCRNYSRAYLHHLDRCNEILGARLNTIHNLRYYQRLMAGLRKAIEEGKLESFVTEFYQRQGRPVPPLNVD

SEQ ID NO: 74849 - protein, 115 aa, Salmonella typhimurium; identical to SEQ ID NO: 73354

SEQ ID NO: 74850 - protein, 300 aa, Salmonella typhimurium
MGSTRKGMLNVLIAAVLWGSSGVCAQYIMEQSRMSSQFLTMIRLLFAGLILVTFSFMHGDKIFSILKNRKDALSLLIFSVVGALTVQLTFLLTIEKSNAATATVLQFLSPTIIVAWFALARRTRPGILVLTAILTSLIGTFLLVTHGNPTSLSISSAALFWGIASAFAAAFYTTWPSRLIAQYGTLPVVGWSMSFGGLILLPFYAKEGTHFAVSGSLILAFFYLVVIGTSLTFSLYLKGAQLIGGPKASILSCAEPLSSALLSLLLLGISFTLPDWLGTLLILSSVILISLDSRRRARAA

SEQ ID NO: 74851 - protein, 346 aa, Salmonella typhimurium
MHYHRIPHSSLEVSTLGLGTMTFGEQNSEADAHAQLDYAIANGINLIDAAEMYPVPPRPETQGLTESYIGNWLAKRGNREKLIIASKVSGPARNNDQGIRPHQALDRKNIREALHDSLTRLQTDYLDLYQVHWPQRPTNCFGKLGYNWTDSTPVVSLLETLDALSEFQRAGKIRYIGVSNETAFGVMRYLHLAEKHDLPRIVTIQNPYSLLNRSYEVGLAEVSQYEGVELLAYSCLAFGTLTGKYLNGAKPAGARNTLFSRFTRYSGEQAQKAVASYVDIAKRHNLDPAQMALAFVRRQPFVASTLLGATTMAQLKTNVESLHLTLSEEVLAEIEAAHQVYTYPAP

SEQ ID NO: 74852 - protein, 340 aa, Salmonella typhimurium
MMATMLDVSRHAGVSKATVSRVLNGTGQVKESTRQKVFTAMQALGYRPNLLARSLANRTSNSIGLVVSTFDGFYFGSLLRRASRQAESHNKQLIVTDGHDTPEREQKAVQMLADRQCDAIILYTRYMDELAILSLIDATEMPLVIINRNVTQARDRAIFFEQETAAFQAVEYLITQGHRDIACITLPVHTPTGTSRVAGYRKALEKYGIPWQPAKVKYGDYTLTRGYDACRELLEEGVTFSALFACNDDTALGAAKALRQAGLRIPQDVSLFGFDDAPGATWLEPGLSTVYLPIEAMIATAIDQAVRLANSEPVAPIPPFTGTLILRESVAAGPFFQRPA

SEQ ID NO: 74853 - protein, 460 aa, Salmonella typhimurium
MRYRFPDNFWWGSACSALQTEGDSLNGGKSQTTWDVWFERQPGRFHQGVGPAETSTFYRHWKQDIALLKQLKHNSFRTSLSWARLIPDGVGEVNPQAVSFYNHVIDELLAQGITPFITLFHFDMPMVMQEKGGWENRDVVEAFGRYAQTCFTLFGDRVKHWFTFNEPIVPVEGGYLYDFHYPNVVDFKRAATVAYHTVLAHSTAVRAWRAGRYDGEIGIVLNLTPSYPRSQHPADVQAAHHADLLFNRSFLDPVLKGEYPADLVALLKTYDQLPACQPGDRQLIADGKIDLLGINYYQPRRVKCRDTAVNPQAPFMPEWLFDYYDMPGRKMNPYRGWEIYAPGIYDIITNLRDNYGNPRCFISENGMGVENEQRFVQAGQIHDDYRIDFISEHLKWLHKGISEGCHCLGYHMWTFIDNWSWLNGYKNRYGFVQLDLATQTRTVKKSGEWFAATAEHNGFD

SEQ ID NO: 74854 - protein, 367 aa, Salmonella typhimurium
MQDEFYMARALKLAQRGRFTTHPNPNVGCVIVNNGDIVGEGYHHRAGEPHAEVHALRMAGAKAKGATAYVTLEPCSHHGRTPPCCDALIAAGVARVVAAMQDPNPQVAGRGLYRLQQAGIAVSHGLMMSEAEALNKGFLKRMRTGFPYLQLKLGASVDGRTAMASGESQWITSPQARRDVQRLRAQSHAILTSSATVLADDPALTVRWAELDASTQASYPQENLRQPVRIVIDSQNRVTPAHRIVQQPGETWIARTQEDSRAWPDAVRTISVPAHNGHLDLVVLMMQLGRQQINSIWVEAGPGLAGALLQAGLVDELIVYVAPKLLGTQARGLCELPGLEKLADAPQFTFSEIRHVGPDVCLHMVSA

SEQ ID NO: 74855 - protein, 156 aa, Salmonella typhimurium
MNIIKANVAAPDARVAITIARFNQFINDSLLDGAVDALTRIGQVKDDNITVVWVPGAYELPLATEALAKSGKYDAVVALGTVIRGGTAHFEYVAGGASNGLASVAQDSGVPVAFGVLTTESIEQAIERAGTKAGNKGAEAALTALEMINVLKAIKA

SEQ ID NO: 74856 - protein, 139 aa, Salmonella typhimurium
VKPAARRRARECAVQALYSWQLSQNDIADVEYQFLAEQDVKDVDVLYFRELLSGVATNSAYLDGLMKPYLSRLLEELGQVEKAVLRIALFELSKRSDVPYKVAINEAIELAKTFGAEDSHKFVNGVLDKAAPVIRPNKK

SEQ ID NO: 74857 - protein, 325 aa, Salmonella typhimurium
MACGEFSLIARYFDRVRSSRLDVETGIGDDCALLNIPEKQTLAISTDTLVAGNHFLPDIDPADLAYKALAVNLSDLAAMGADPAWLTLALTLPEVDEPWLEAFSDSLFALLNYYDMQLIGGDTTRGPLSMTLGIHGYIPAGRALKRSGAKPGDWIYVTGTPGDSAAGLAVLQNRLQVSEETDAHYLIQRHLRPTPRILHGQALRDIASAAIDLSDGLISDLGHIVKASGCGARVDVDALPKSDAMMRHVDDGQALRWALSGGEDYELCFTVPELNRGALDVAIGQLGVPFTCIGQMSADIEGLNFVRDGMPVTFDWKGYDHFATP

SEQ ID NO: 74858 - protein, 288 aa, Salmonella typhimurium
MGEFSTLLQQGNGWFFIPSAILLGILHGLEPGHSKTMMAAFIIAIKGTVKQAVMLGLAATLSHTAIVWLIALGGMYLSRAFTAQSVEPWLQLISAIIILSTACWMFWRTWRGEQQWLAGNHHHDHDHDHDHDHDHDHDHDHDHDHDHDHHGHIHPEGATSKAYQDAHERAHAADIQRRFDGQTVTNGQILLFGLTGGLIPCPAAITVLLICIQLKAFTLGATMVLSFSLGLALTLVTVGVGAAISVQQAAKRWSGFSTLARRAPYFSSILIGLVGVYMGIHGYTGIMQ

SEQ ID NO: 74859 - protein, 601 aa, Salmonella typhimurium
MIARVMLLLVALVSAGAQAQEIKESYAFAVLGEPKYAFNFEHFDYVNPAAPKGGQMTLSAIGTFDNFNRYSLRGNPGVRTEALYDTLFTTSDDEPGSYYPLIADHARYAADYSWVEISINPRARFHDGTPITARDVAFTFHKFMTEGVPQFRLVYKGTTVKAIAPLTVRIELAKPGKEDMLSLFSLPIMPEKFWKNHKLSDPLSTPPLASGPYRITQWKMGQYIVYSRVKNYWAANLPVNRGRFNLDTIRYDYYLDDNVAFEAFKAGAFDLRLENDAKNWATRYIGKNFDNHYIIKEEQKNESAQDTRWLAFNIQRPVFKDRRVREAVTLAFDFEWMNKALFYNAWSRTNSYFQNTEYAARNYPDADELVLLAPMKKDLPPEVFTQIYQPPVSNGDGYDRENLLKADALLTQAGWVINGQQRVNSVTGKPLTFELLLPASSNSQWVLPFQHNLQRLGITMTIRQVDNSQLTNRMRSRDYDMMPRLWRAMPWPSSDLQISWASEYIDSSYNAPGVQSPVVDKLIAQIIAAQGDKAKLVPLGRALDRVLTWNYYMLPMWYMAQDRLARWDKFSHPAIRPVYTIGLDTWWYDVNKAAKLPAARR

SEQ ID NO: 74860 - protein, 586 aa, Salmonella typhimurium
MIFTLRPYQQEAVDATLSHFRRHRTPAVIVLPTGAGKSLVIAELARVARGRVLVLAHVKELVAQNHAKYCALGLEADIFAAGLKRKESQGKVVFGSVQSVARNLDAFQEEFSLLIVDECHRIGDDEDSQYQQILTHLSKVNPHLRLLGLTATPFRLGKGWIYQFHYHGMVRGNDNALFRDCIYELPLRYMIKHGYLTPPERLDMPVVQYDFSRLQAQSNGLFSEADLNRELKKQQRITPHIISQIMEFAQTRKGVMIFAATVEHAKEIVGLLPADDAALITGDTPGPERDALIDNFKAQRFRYLVNVSVLTTGFDAPHVDLIAILRPTESVSLYQQIVGRGLRLAPGKTDCLILDYAGNPHDLYAPEVGSPKGKSDNVPVQVFCPACGFANTFWGKTTADGTLIEHFGRRCQGWFEDDDGHREQCDFRFRFKNCPQCNAENDIAARRCRECDAILVDPDDMLKAALRLKDALVLRCSGMTMQHGQDEKGEWLKITYYDEDGADVSERFRLHTPAQRTAFEQLFIRPHTRTPGVPLRWITAADIVAQQALLRHPDFVVARMKGQYWQVREKVFDYEGRFRRAHELRG

SEQ ID NO: 74861 - protein, 94 aa, Salmonella typhimurium
MFTINAEVRKEQGKGASRRLRAANKFPAIIYGGSEAPIAIELDHDQVMNMQAKAEFYSEVLTLVVDGKEVKVKAQAVQRHAYKPKLTHIDFVRA

SEQ ID NO: 74862 - protein, 609 aa, Salmonella typhimurium
MIYKKFRLDINGLRAFALISVVLYHFGVPYVSGGFIGVDVFFVISGFLMTGIVLERVDHKGVLDFYIARFLRIVPALVFAILLLMIFGLFTLSTNEYEALSKNAISSLLFYSNNYYAIHSSYFDSSSEFNFLLHTWSLSVEWQFYILYPLLVIIVKKLRFPVGLSLSVILAMSLAITLMRVTGTKEDIFYLIPTRAWEMLAGGLVYIASVRYKMPEWIKHCEVYGIVLIVVAVVILHSNGYWPSYSALAPVLGASMVILANKQNSLFTSNRIAQWVGKISYSVYLWHWPVIVAMKHYDIEFSAINIFFGVIVSFALGDISYRTIENTLRKRVKLQFNIVLFSSTLALCLFVMFTKGVSFRFSDTLKQVVEYRMDNSPWRPDICFLNPDQDYSAFSKCQDKMTEKSFVVWGDSHAAHLMPGLKSVFGNSLNITQRTASLCPPIIGLQKDDRPYCKDINDMVAKEISDNKPTTVLMSALWPVYPMRDYLPETIKFLKDNKVKNIIIVGPFPVWKKTMIDTIEDMGINSGRTVPWSMTDETRNLRDNDKYLRELAKEHSLTYISPLETMCTESYCKAIIGNRIAYPIQYDNAHLTPEGSGWFIEEVKKQISK

SEQ ID NO: 74863 - protein, 509 aa, Salmonella typhimurium
MRIGIPKERLPNETRVAATPKTVEQLLKLGFSVAIESGAGQLASFDDKAFAQAGADIVDGNAIWQSEIILKVNAPEEEEIALLNPGTTLVSFIWPAQNPGLMEKLAERKVTVMAMDSVPRISRAQSLDALSSMANIAGYRAIVEAAHEFGRFFTGQITAAGKVPPAKVMVIGAGVAGLAAIGAANSLGAIVRAFDTRPEVKEQVQSMGAEFLELDFKEEAGSGDGYAKVMSEAFIKAEMALFAAQAKEVDIIVTTALIPGKPAPKLITRDMVDSMKAGSVIVDLAAQNGGNCEYTVANQVVTTDNGVKVIGYTDLPGRLPTQSSQLYGTNLVNLLKLLCKEKDGNIDVDFDDVVIRGVTVIRDGDITWPAPPIQVSAQPQAAPKAAPAPKEPEKPTSPWRKYALMALAIILFGWLADVAPKEFLGHFTVFALACVVGYYVVWNVSHALHTPLMSVTNAISGIIVVGALLQIGQGGWVSFLSFIAVLIASINIFGGFTVTQRMLKMFRKN

SEQ ID NO: 74864 - protein, 164 aa, Salmonella typhimurium
MKMFVPAVVFAALASASAWANNGDTAQPLEKIAPYPQAEKGMKRQVITLTPQQDESTLKVELLIGQTLNVDCNQHRLGGTLETKTLEGWGYDYYVFDNVTSPVSTMMACPEGKKEQKFVTAWLGEDGMLRYNSKLPIVVYTPANVDVKYRIWKADANVQNAVAR

SEQ ID NO: 74865 - protein, 889 aa, Salmonella typhimurium
MSQSDTTVSTRFSLLPGSITRFFLLLIIVLLVTMGVMVQSAVNAWLKDKSYQIVDITHAIHKRVDTWRYVTWQIYDNIAATTTPSTGEGLQETRLKQDVYYLEKPRRKTEALIFGSHDSATLEMTQRMSTYLDTLWGAENVPWSMYYLNGQDNSLILISTLPLKDLSSGFKESTIGNIVDSRRAEMLQQANALDERESFSSLRKLAWQNGHYFTLRTTFNQPGHLATVVAFDLPINDLIPPGMPLDSFRIEPDATQATGRSSEKEAPDSVTISFNGSKIEISSALNSTGMRLIWQVPFGTLLLDTLQNILLPLLLNIGLLALALFGYATFRHQPGRSTESTSGNAANNELRVLRAINEEIVSLLPLGLLVYDQEGNRTVISNKIADHLLPHLNLQNITSMAEQHQGVIQATINNELYEIRLFRSQIAPRTQIFIIRDQDREVLVNKKLKQAQRLYEKNQQGRAAFMQNISNTLKEPVRQLAVNAAAVTTPESLKLADQADVLVRMIDEIQLANMLENDAWKSEATLFSLQDLIDEVVPEVLPAIKRKGLQLLINNHLSGNDERWGDRDALRRILLLLIQYAVTTTAMGKITLEVEQDESIAERLTFRILDTGEGVTLNEIDNLHFPYMNETQGDRYGKANPLTFWLCNQLARKLGGHLNIKARETLGTRYTVHVKMLPHDQHTQVEERLLDDVSVMVDVTSNEVRAIVLRQLENWGATCITPDERQISQEYDLFLTDNPSNLTASGLLLSDDESGVRKIGPGQLRVNFNMSNAMQEAVLQLIEEQLAQEEIPASPLGGDENAELHASGYYALFVDTVPDDVKRLYTEAATSDFAALAQTAHRLKGVFAMLNLVPGKQLCETLEHLIREKDAPGIEKYISDIDAYVKSLL

SEQ ID NO: 74866 - protein, 216 aa, Salmonella typhimurium; identical to SEQ ID NO: 73257

SEQ ID NO: 74867 - protein, 488 aa, Salmonella typhimurium
MQNRLLSAKATLPDYDRAALAARMVHLGFGAFHRAHQGVYTDILAAEQHSDWGYYEVNLIGGEQQIADLKQQDNLYTVAEMSAEAWTARVVGVVKAALHVQVDGLERVLAAMCEPQIAIVSLTITEKGYCHSPATGQLLLEHPMIAADLQNPHQPLTAPGIIVEALARRKAAGLPAFTVMSCDNMPENGHVTRQVVTAYAREVDAELAIWIEQNVTFPSTMVDRIVPAVTPETLDKIEQLTGVRDPAGVACEPFRQWVIEDTFVAGRPLWENAGATLVADVVPFEEMKLRMLNGSHSFLAYLGYLAGYQHINDCMADDNYRLTAQALMLREQAPTLKVQGVDLQRYADQLIARYRNPALRHRTWQIAMDGSQKLPQRMLDSVRWHLANHSDFDLLALGVAGWMRYVGGVDEQGKAIDVSDPLLPVIQRAVANSEEGASRVKALLGMAEIFGNDLPQAARFTQKVQEAYDSLLTYGAKASVAKYAERLK

SEQ ID NO: 74868 - protein, 761 aa, Salmonella typhimurium
MNQSLLVTKRDGRTERINLDKIHRVLDWAAEGLNNVSVSQVELRSHIQFYDGIKTSDIHETIIKAAADLISRDAPDYQYLAARLAIFHLRKKAFGQFEPPALYHHVVKMVELGKYDNHLLEDYTEEEFKQMDSFIVHDRDMTFSYAAVKQLEGKYLVQNRVTGEIYESAQFLYILVAACLFSNYPRETRLDYVKRFYDAVSTFKISLPTPIMSGVRTPTRQFSSCVLIECGDSLDSINATSSAIVKYVSQRAGIGINAGRIRALGSPIRGGEAFHTGCIPFYKHFQTAVKSCSQGGVRGGAATLFYPMWHLEVESLLVLKNNRGVEGNRVRHMDYGVQINKLMYTRLLKGGDITLFSPSDVPGLYDAFFADQDEFERLYVKYEHDDSIRKQRVKAVELFSLMMQERASTGRIYIQNVDHCNTHSPFDPVVAPVRQSNLCLEIALPTKPLNDVNDENGEIALCTLSAFNLGAIKTLDELEELAILAVRALDALLDYQDYPIPAAKRGAMGRRTLGIGVINFAYWLAKNGKRYSDGSANNLTHKTFEAIQYYLLKASNELAKEQGACPWFNETTYAKGILPIDTYKKDLDAIVNEPLHYDWEQLRESIKTHGLRNSTLSALMPSETSSQISNATNGIEPPRGYVSIKASKDGILRQVVPDYEHLKDAYELLWEMPNNDGYLQLVGIMQKFIDQSISANTNYDPSRFPSGKVPMQQLLKDLLTAYKFGVKTLYYQNTRDGAEDAQDDLAPSIQDDGCESGACKI

SEQ ID NO: 74869 - protein, 376 aa, Salmonella typhimurium
MAYTTFSQTKNDQLKEPMFFGQPVNVARYDQQKYDIFEKLIEKQLSFFWRPEEVDVSRDRIDYQALPEHEKHIFISNLKYQTLLDSIQGRSPNVALLPLISIPELETWVETWAFSETIHSRSYTHIIRNIVNDPAVVFDDIVTNEQIQKRAEGISAYYDELIEMTSYWHLLGEGTHTVNGKTVVVNLRELKKKLYLCLMSVNALEAIRFYVSFACSFAFAERELMEGNAKIIRLIARDEALHLTGTQHMLNLLRSGVDDPEMAEIAEECKQECYDLFVQAAQQEKEWADYLFRDGSMIGLNKDILCQYVEYITNIRMQAVGLDLPFQTRSNPIPWINTWLVSDNVQVAPQEVEVSSYLVGQIDSEVDTDDLSNFQL

SEQ ID NO: 74870 - protein, 396 aa, Salmonella typhimurium
MSDTRFESCIKCTVCTTACPVSRVNPGYPGPKQAGPDGERLRLKDGALYDEALKYCINCKRCEVACPSDVKIGDIIQRARAKYDTTRPSLRNFILSHTDLMGSVSTPFAPVVNTATALKPVRQLLDYALKIDHRRTLPKYSFGTFRRWYRSVAAQQAKYKDQVAFFHGCFVNYNHPQLGKDLIKVLNAMGTGVQLLSKEKCCGVPLIANGFTDKARKQAISNVESLREAIAVKGIPVIATSSTCTFALRDEYPEVLDVDNAGLREHIELATRWLWRKLDAGKTLPLNPLPLKVVYHTPCHMEKMGWTLYTLELLRQIPGLELTVLDSQCCGIAGTYGFKKENYPTSQSIGAPLFRQIEESGADIVVTDCETCKWQIEMSTSKRCEHPITLLAQALG

SEQ ID NO: 74871 - protein, 317 aa, Salmonella typhimurium
VSDEALTLLFSAVENGDQNCIDLLCNLALRNDDLGHRVEKFLFDLFSGKRTGSSDIDKKINQACLVLHQIANNDITKDNTEWKKLHAPSRLLYMAGSATTDLSKKIGIAHKIMGDQFAQTDQEQVGVENLWCGARMLSSDELAAATQGLVQESPLLSVNYPIGLIHPTTKENILSTQLLEKIAQSGLSHNEVFLVNTGDHWLLCLFYKLAEKIKCLIFNTYYDLNENTKQEIIEAAKIAGISESDEVNFIEMNLQNNVPNGCGLFCYHTIQLLSNAGQNDPATTLREFAENFLTLSVEEQALFNTQTRRQIYEYSLQ

SEQ ID NO: 74872 - protein, 221 aa, Salmonella typhimurium
MMDLFKAIGLGLVVLLPLANPLTTVALFLGLAGNMNSAERNRQSYMASVYVFAIMMVAYYAGQLVMNTFGISIPGLRIAGGLIVAFIGFRMLFPQQKAHESPEAKSKSEELADEPTANIAFVPLAMPSTAGPGTIAMIISSASTVRHGGEFPDWVIMVAPPIIFLAVAVILWGCLRSSGAIMRLVGKGGIEAISRLMGFLLVCMGVQFIINGVLEIIKTYH

SEQ ID NO: 74873 - protein, 660 aa, Salmonella typhimurium
MKAVIFAYHDMGCQGVQAVLDAGYEIAAIFTHADNPAENTFFGSVSRQAAELGIPVYAPDNVNHPIWVDRIAELAPDIIFSFYYRNLLSEEILHLAPAGAFNLHGSLLPAYRGRAPLNWVLVNGESETGVTLHRMVKRADAGEIVASQRVAIAQDDVALTLHHKLCQAARQLLNSILPTMKCGDIPSVPQRESDSTYYGRRRPEDGLIDWHKPVSTVHNLVRAVAAPWPGAFSYNGSQKFTIWSSRMCPDAQGALPGSVISVSPLRVACADGALEIITGQAGDDITVQGSQLAQTLGLVAGARLNRPPATSGKRRIRVLILGVNGFIGNHLTERLLNEENYEVYGMDIGSNAISRFLLHPRFHFVEGDISIHSEWIEYHVKKCDVVLPLVAIATPIEYTRNPLRVFELDFEENLRIIRYCVKYRKRVVFPSTSEVYGMCTDASFDEDKSNLIVGPVNKPRWIYSVSKQLLDRVIWAYGEKEGLRFTLFRPFNWMGPRLDSLNAARIGSSRAITQLILNLVEGTPIKLIDGGQQKRCFTDIRDGIEALFRIIVNDGDRCDGKIINIGNPDNEASIQELATLLLDSFDKHPLRCHFPPFAGFQVVESRSYYGKGYQDVAHRKPSIDNARRCLGWEPSIAMRDTVEETLDFFLRSVDIAERAS

SEQ ID NO: 74874 - protein, 361 aa, Salmonella typhimurium
LFFLFRSVFRVVFIAGMFYGAHRGVSDGGSARDASNAQSDFIGGSLNAGLRNARCPAVKRTVIPESIFRTSEASMTRLDRKRHAIIPANGTGVIGGRAFTAHLVQAIPFSGAFVIPRFHKLTGIEMRASVTFVMNSLAIKHFWSSKTIKGRDAIKCQHIGDNGGHHFRYRRAAWHFNNGFIGNLVNRRGFSWVGTGCLHAAPCAGPPGDNRFSIRADAFLLQERLASQYAKHPIFIQRRVTFHSNDIISFVLTHHIRQRLLSLLPCGGHNGVVIIQGNERQNGIFCQRVRRANERFGTAGTFKTMQPYHWRTRFILQGISYLRNHRTAQARRCGKAAKLEEATPCHAVSTHNLIKCILCLH

SEQ ID NO: 74875 - protein, 363 aa, Salmonella typhimurium
MMKKSKAMLFIAPALFSYALAAQACTTLAIQDKQGDIFHGRTLEYMQDLPSWLTYYPAGTQFDKKTPDGSQGISYQAKYPILAITSTITDGDSRDILEGMNSAGLSFSENMIMNAQLPPLPASEYKQAIPVTSLGEWALARFATVGEVKQAIKEGKFWSPELHRFGDLKSPFHYAFYDKKGGSIVVEVENGKFHVYDNPTRVMTNGPAFPWHLTNLNNYTQLTNVDRSSGTLGGIKVMQPDSGIAIADLPSSDTSVSRFIRGVYYTTYAPQATSAHDAMNTLAHIMSRFDRPKNITVDYMGSEGEGNATRKPVSEYTVWTTLSDLMHGEMMVRGYNDINYKTWSLSQFKNATAPVFEKINVKG

SEQ ID NO: 74876 - protein, 125 aa, Salmonella typhimurium
MGVMWGLISVAIASLAQLSLGFAMMRLPSIAHPLAFISGLGAFNAATLALFAGLAGYLVSVFCWQKTLHTLALSKAYALLSLSYVLVWVASMLLPGLQGAFSLKAMLGVLCIMAGVMLIFLPARS

SEQ ID NO: 74877 - protein, 353 aa, Salmonella typhimurium
MSPTMLTYINEESDVLANIIRRHRQSLEEVSRFASQKTLRRILILATGSSLNAAFCARYFFERCGISIDIKEPYTFSQYENSDPQADMVIAISQSGKSASTLEAMRKVQAQGRPVFALTADPQSPLGKASDYPLDILTGIESVGFVTRGFSATVLNLLLIALLIARQQQRLTESQVEEYVAQLQRIAATLPLVIVRTEAFIHQHQAVLRNGTRFVATGYGALVGVAKELETKFTETVRVPSSGFELEAYMHGPYLEANAEHVMFFFEDRPDARSRALREYMTPAVAKTFTLTLAKAAQDDQTLALDVAVDHHFSPLLLIVPVQLMAFHIASLKGIDLSVRIFDDFDRVLKSKI

SEQ ID NO: 74878 - protein, 71 aa, Salmonella typhimurium; identical to SEQ ID NO: 72703

SEQ ID NO: 74879 - protein, 529 aa, Salmonella typhimurium
MTLSPYLQEVAKRRTFAIISHPDAGKTTITEKVLLFGQAIQTAGTVKGRGSSQHAKSDWMEMEKQRGISITTSVMQFPYHDCLVNLLDTPGHEDFSEDTYRTLTAVDCCLMVIDAAKGVEDRTRKLMEVTRLRDTPILTFMNKLDRDIRDPMELLDEVENELKIGCAPITWPIGCGKLFKGVYHLYKDETYLYQTGKGHTIQEVRIVKGLNNPDLDAAVGEDLAQQLRDELELVQGASNEFDEELFLAGEITPVFFGTALGNFGVDHMLDGLVAWAPAPMPRQTDTRTVEASEEKFTGFVFKIQANMDPKHRDRVAFMRVVSGKYEKGMKLRQVRTGKDVVISDALTFMAGDRSHVEEAYPGDILGLHNHGTIQIGDTFTQGEMMKFTGIPNFAPELFRRIRLKDPLKQKQLLKGLVQLSEEGAVQVFRPISNNDLIVGAVGVLQFDVVVARLKSEYNVEAIYESVNVATARWVESADAKKFEEFKRKNETQLALDGGDNLTYIAPTMVNLNLTQERYPDVQFRKTREH

SEQ ID NO: 74880 - protein, 336 aa, Salmonella typhimurium
MKAAVVTQDHQVDVTEKTLRPLRHGEALLKMECCGVCHTDLHVKNGDFGDKTGVILGHEGIGVVAEVGPGVTSLKPGDRASVAWFYEGCGHCEYCNTGNETLCRNVKNAGYTVDGGMAEECIVVADYAVKVPEGLDSAAASSITCAGVTTYKAVKISHIKPGQWIAIYGLGGLGNLALQYAKNVFNAKVIAIDVNDGQLKLAEEMGADLTINSRTEDAAKIVQEKTGGAHAAVVTAVAKAAFNSAVDAVRAGGRVVAVGLPPEAMNLDIPRLVLDGIQVVGSLVGTRQDLTEAFQFAAEGKVVPKVALRPLEDINVIFKEMEQGQIRGRMVIDFRR

SEQ ID NO: 74881 - protein, 274 aa, Salmonella typhimurium
MVGLIRGVSEGLGPVGGAAMIYSLSGLLLIFTVGLPDIRRFPGRYLIAGSVLFVSYEICLALSLGYAATRHQAIEVGMVNYLWPSLTILFAILFNGQKTNWLIVPGLLIALTGVCWVLGGENGLNPGEIISNVATSPLSYLLAFLGAFIWATYCTVTNKYARGFNGITVFVLLTAVALWLHYFLTPQPAMIFSLPVIAKLFTAALTLGFAYAAWNVGILHGNVTIMAVGSYFTPVMSSALAALLLSSPLSFSFWQGAVMVCVGSLLCWLATRRR

SEQ ID NO: 74882 - protein, 265 aa, Salmonella typhimurium
MPLENVMTDLKASSLRALKLMDLTTLNDDDTNEKVIALCHQAKTPVGNTAAICIYPRFIPIARKTLKEQGTPDIRIATVTNFPHGNDDIDIALAETRAAIAYGADEVDVVFPYRALIAGNEQVGFDLVKACKDACAAANVLLKVIIETGELKEEALIRKASEISIKAGADFIKTSTGKVPVNATPESARIMMEVIRDMGVSKTVGFKPAGGVRTAEDAQKFLAIADELFGADWADSRHYRFGASSLLASLLKALGHGDGKSASSY

SEQ ID NO: 74883 - protein, 462 aa, Salmonella typhimurium
MTRQNENYNRYLLSDWRPENPAFWENKGKGIARRNLWISVSCLLLAFCVWMLFSAVAVNLNKIGFNFTTDQLFLLTALPSLSGAILRVPYSFMVPLFGGRKWTVLSTVILIIPCAWLGFAVQNPATPFGVFMLIALLCGFAGANFASSMGNISFFFPKARQGSALGINGGLGNLGVSVMQLIAPLVIFLPIFTFLGVQGVPQPDGSLLALTNAAWIWVPLLAVATLAAWFGMNDIGSSKASVASQLPVLKRLHLWLLSLLYLATFGSFIGFSAGFAMLAKTQFPDVNILQLAFFGPFIGALARSAGGVISDKFGGVRVTLINFIFMALFTALLFLTLPGSGAGSFSAFYLVFMGLFLTAGLGSGSTFQMIAVIFRQITLYNVKLRGGSDEQAQREAVTDTAAALGFISAIGAVGGFFIPKAFGTSLALTGSPVGAMKIFLLFYLACVLLTWLVYGRRKPKQQ

SEQ ID NO: 74884 - protein, 1246 aa, Salmonella typhimurium
MSKLLDRFRYFKQKGDTFADGHGQVMHTNRDWEDSYRQRWQFDKIVRSTHGVNCTGSCSWKIYVKNGLVTWETQQTDYPRTRPDLPNHEPRGCPRGASYSWYLYSANRLKYPLVRKRLIELWREALSRHSDPVLAWESIMNDPQKCQSYKQVRGHGGFIRSNWKELNQLIAAANVWTIKTYGPDRVAGFSPIPAMSMVSYAAGTRYLSLLGGTCLSFYDWYCDLPPASPMTWGEQTDVPESADWYNSAYIIAWGSNVPQTRTPDAHFFTEVRYKGTKTIAITPDYSEVAKLCDQWLAPKQGTDSALAMAMGHVILKEFHLDNPSDYFLNYCRRYTDMPMLVLLDERADGSYVPGRMMRASDLVDGLGEANNPEWKTVALNSTGELVAPNGSIGFRWGEKGKWNLEPVAAGVETELSLSLLGQHDDVAGVAFPYFGGNENPHFRSVRQEPVLVRQLPVKRLALADGSERMVVSVYDLVLANYGLDRGLDDGHSANNYNDVKAYTPAWGEQITGVPRRHIETIAREFAETAHKTHGRSMIILGAGVNHWYHMDMNYRGMINMLVFCGCVGQTGGGWAHYVGQEKLRPQTGWLPLAFALDWNRPPRQMNSTSFFYNHASQWRYEKLTAQELLSPLADPAKFSGHLIDFNVRAERMGWLPSAPQLNLNPLSVKASADKAGLSAADYTVQALKSGAIRFACEQPDSGHNHPRNLFVWRSNLLGSSGKGHEYMLKYLLGTDSGIQGEALGSSEGIKPEEVEWQSTAIEGKLDLLVTLDFRMSSTCLFSDIVLPTATWYEKDDMNTSDMHPFIHPLSAAVDPAWESKSDWEIYKGIASVFSEVCVGHLGQETDVVLHPLQHDSPAELAQPFDILDWRKGECELIPGKTAPNIVVVERDYPATYERFTSLGPLLDKLGNGGKGIAWNTQDEVDFLGKLNYTKHDGPAKGRPRIDTALDASEVILALAPETNGQVAVKAWQALGEMTGREHTHLAINKEDEKIRFRDIQAQPRKIISSPTWSGLESEHVSYNAGYTNVHELIPWRTLSGRQQLYQDHAWMRAFGESLVAYRPPIDTRSVSEMREIPPNGFPEKALNFLTPHQKWGIHSTYSENLLMLTLSRGGPIVWISEADARELGIEDNDWIEAFNANGALTARAVVSQRVPPGMTMMYHAQERIMNIPGSEVTGMRGGIHNSVTRVCPKPTHMIGGYAQLAYGFNYYGTVGSNRDEFIMIRKMKNINWLDDEGRDQVQEAKK

SEQ ID NO: 74885 - protein, 514 aa, Salmonella typhimurium
MKIRSQVGMVLNLDKCIGCHTCSVTCKNVWTGREGMEYAWFNNVETKPGIGYPKNWEDQQEWQGGWVRDVNGKIRPRLGGKMGVISKIFANPVIPQIDDYYEPFTFDYQHLHNAPESKHQPTARPRSLIDGKRMDKVIWGPNWEELLGGEFEKRARDRNFDNIQKEMYGQFENTFMMYLPRLCEHCLNPSCVATCPSGAIYKREEDGIVLIDQDKCRGWRLCISGCPYKKIYFNWKSGKSEKCIFCYPRIESGQPTVCSETCVGRIRYLGVLLYDADRIEEAASTEHETDLYERQCDVFLNPHDPAVIEEALKQGIPQNVIDAAQRSPVYKMAMDWKLALPLHPEYRTLPMVWYVPPLSPIQSYADAGGLPHNGNILPAVETLRIPVQYLANMLSAGDTGPVIRALKRMMAMRHYMRSQTVEGVTDTRAIEEVGLSIQQVEEMYRYLAIANYEDRFVIPTSHREMARDAFPERNGCGFTFGDGCHGSDTKFNLFNSSRIDAINITEVRDKAEGE

SEQ ID NO: 74886 - protein, 226 aa, Salmonella typhimurium
MIQYLNVFFYDIYPYICATVFFLGSWLRYDYGQYTWRASSSQMLDKRGMVIWSNLFHIGILGIFFGHLFGMLTPHWMYAWFLPIAVKQQMAMILGGVCGVLTLIGGAGLLWRRLTNQRVRATSTTPDIIIMSILLIQCLLGLSTIPFSAQYPDGSEMMKLVGWAQSIVTFRGGSSEMLSGVAFVFRVHLVLGMTIFLLFPFTRLVHVWSAPFEYFTRRYQIVRTRR

SEQ ID NO: 74887 - protein, 460 aa, Salmonella typhimurium
VAKAPKRAFVCNECGADYPRWQGQCSACHAWNTITEVRLAASPTVARNERLSGYAGSAGVSKVQKLSDISLEELPRFSTGFKEFDRVLGGGVVPGSAILIGGNPGAGKSTLLLQTLCKLAEQMKTLYVTGEESLQQVAMRAHRLGLPTANLNMLSETSIEQICLIAEEEQPKLMVIDSIQVMHMADIQSSPGSVAQVRETAAYLTRFAKTRGVAIVMVGHVTKDGSLAGPKVLEHCIDCSVLLDGDADSRFRTLRSHKNRFGAVNELGVFAMTEQGLREVSNPSAIFLSRGDEVTSGSSVMVVWEGTRPLLVEIQALVDHSMMANPRRVAVGLEQNRLAILLAVLHRHGGLQMSDQDVFVNVVGGVKVTETSADLALLLAMVSSLRDRPLPQDLVVFGEVGLAGEIRPVPSGQERISEAAKHGFRRAIVPAANVPKKPPEGMLVFGVKKLADALSVFDDL

SEQ ID NO: 74888 - protein, 215 aa, Salmonella typhimurium
MLQVYLVRHGETQWNAERRIQGQSDSPLTAKGEQQAMQVGERARSLGITHIISSDLGRTKRTAEIIAQACGCDITFDSRLRELDMGVLEKRQIDSLTEEEEGWRRQLVNGTQDGRIPGGESMQELSDRVHAALASCLELPQGSRPLLVSHGIALGCLVSTILGLPAWAERRLRLRNCSISRIDYQESQWLASGWVVETAGDVSHLDAPALDELQR

SEQ ID NO: 74889 - protein, 449 aa, Salmonella typhimurium
MLKSPLLWKMITLGGAMILLLIPLMMVRHTIVERADYRSHVEAAIRQSTSGPQKVVGPLVAIPVTELYTVLEEEKEVQYKRSYLYFWLPESLLVEGNQNVEARKIGIYQGQVWHTDMAIKAEFDVARLHELNRPNITLGKPFIVVGVGDARGISAVKAPQVNGETLTVEPGTGLPESREGIHIPLPDSQWATRNLTLDMSLNLSGTGSFSLVPVGRSSEMTLASNWPHPNFVGDFLPGKREISGSGFQAQWQTSRFATNLGEQFADAQKVDWDNLPAFSVAVSTPADQYQLTDRATKYAILLITLTFMAFFVFETLTGQRLHPMQYLLVGLSLVMFYLLLLALSEHIGFTPAWIAASLVGALMNSVYLQAVLKGWRNSVLFTLALLALDGVMWGLLRSEDSSLLLGTGVLLLALGGVMFLTRHLDWYSLSCQQRKSLPPVKDDELRLWK

SEQ ID NO: 74890 - protein, 367 aa, Salmonella typhimurium
MTSRNYLLLTPGPLTTSRTVKEAMLFDSCTWDDDYNIGVVEQIRQQLTALATASEGYTSVLLQGSGSYAVEAVLGSALGPQDKVLIVSNGAYGARMVEMAGLMGIAHHAYDCGEVARPDVQAIDAILNADPTISHIAMVHSETTTGMLNPIDEVGALAHRYGKTYIVDAMSSFGGIPMDIAALHIDYLISSANKCIQGVPGFAFVIAREQKLAACKGHSRSLSLDLYAQWRCMEDNHGKWRFTSPTHTVLAFAQALKELAKEGGVAARHQRYQQNQRSLVAGMRALGFNTLLDDELHSPIITAFYSPEDPQYRFSEFYRRLKEQGFVIYPGKVSQSDCFRIGNIGEVYAADITALLTAIRTAMYWTK

SEQ ID NO: 74891 - protein, 441 aa, Salmonella typhimurium
SSFADKLFNFKAIGHFAVDFDVSGMLFRHDQRFAYAFHCQQSLFPVVSNDIRWNFHTQAADIGRLFHGTCHCQPYHRQYGPGKENGLPIKRAVYPAAQRAAKRHAKKLTGRIDAHRRSFIPRGRLFANKRRQQRLHQIKGEEKELYANHQLPEMLARSPQHDFCDDNEPHAEQEYLLHPPFDFSIDNKRHDGGKGDHHGCQIHLPVFGGRETGIGKLAGQGDKGGHQNMQTHNAEIEFEQPRLRQHFTEAAFDHPGFAIQHMVGTVGNHPDRQKNAQSGEGGDHPEQRVQSQTMGNDRPYHRNREGDTKADADKRHRFGTVLLAGEVRQERHDGGGNSAGPLRSPQNNAPDVGERGNDAARDKYRQSADNQRFAANAVGQQPKGNLKDSLRQPVNADRNADCFAGALRHTVCGQYWNHKHAQHTQRKDGPTPCGAQLPWRH

SEQ ID NO: 74892 - protein, 394 aa, Salmonella typhimurium
MKRQRNVNLLLMLVLLVAVGQMAQTIYIPAIADMAQALNVREGAVQSVMAAYLLTYGVSQLFYGPLSDRVGRRPVILVGMSIFMVATLFAMTTHSLTVLIAASAMQGMGTGVGGVMARTLPRDLYEGTQLRHANSLLNMGILVSPLLAPLIGSLLDTLWNWRACYAFLLVLCAGVTFSMARWMPETRPAGAPRTRLIASYKTLFGNGAFNCYLLMLIGGLAGIAVFEACSGVLMGAVLGLSSMVVSILFILPIPAAFFGAWFAGRPNKRFSTLMWQSVICCLLAGLMMWIPGWFGVMNVWTLLIPAALFFFGAGMLFPLATSGAMEPFPFLAGTAGALVGGLQNIGSGVLAWLSAMLPQTGQGSLGLLMTLMGLLILACWLPLASRISHQGQTV

SEQ ID NO: 74893 - protein, 423 aa, Salmonella typhimurium
MTDKRKDGSGKLLYCSFCGKSQHEVRKLIAGPSVYICDECVDLCNDIIREEIKEVAPHRERSALPTPHEIRTHLDDYVIGQEQAKKVLAVAVYNHYKRLRNGDTSNGVELGKSNILLIGPTGSGKTLLAETLARLLDVPFTMADATTLTEAGYVGEDVENIIQKLLQKCDYDVQKAQRGIVYIDEIDKISRKSDNPSITRDVSGEGVQQALLKLIEGTVAAVPPQGGRKHPQQEFLQVDTSKILFICGGAFAGLDKVIANRVETGSGIGFGATVKAKSDKASEGELLSQVEPEDLIKFGLIPEFIGRLPVVATLNELSEEALIQILKEPKNALTKQYQALFNLEGVDLEFRDEALDAIARKAMARKTGARGLRSIVEAALLDTMYDLPSMEDVEKVVIDESVIAGQSKPLLIYGKPEAQASGE

SEQ ID NO: 74894 - protein, 784 aa, Salmonella typhimurium
MNPERSERIEIPVLPLRDVVVYPHMVIPLFVGREKSIRCLEAAMDHDKKIMLVAQKEASTDEPGVNDLFTVGTVASILQMLKLPDGTVKVLVEGLQRARISALSDNGEHFSAKAEYLDSPAIDEREQEVLVRTAISQFEGYIKLNKKIPPEVLTSLNSIDDPARLADTIAAHMPLKLADKQSVLEMSDVNERLEYLMAMMESEIDLLQVEKRIRNRVKKQMEKSQREYYLNEQMKAIQKELGEMDDAPDENEALKRKIDAAKMPKEAKEKAEAELQKLKMMSPMSAEATVVRGYIDWMVQVPWNARSKVKKDLRQAQEILDTDHYGLERVKDRILEYLAVQSRVNKIKGPILCLVGPPGVGKTSLGQSIAKATGRKYIRMALGGVRDEAEIRGHRRTYIGSMPGKLIQKMAKVGVKNPLFLLDEIDKMSSDMRGDPASALLEVLDPEQNVAFSDHYLEVDYDLSDVMFVATSNSMNIPAPLLDRMEVIRLSGYTEDEKLNIAKRHLLPKQIERNALKKGELTVDDSAIIGIIRYYTREAGVRSLEREISKLCRKAVKQLLLDKSLKHIEINGDNLHDYLGVQRFDYGRADSENRVGQVTGLAWTEVGGDLLTIETACVPGKGKLTYTGSLGEVMQESIQAALTVVRARAEKLGINPDFYEKRDIHVHVPEGATPKDGPSAGIAMCTALVSCLTGNPVRADVAMTGEITLRGQVLPIGGLKEKLLAAHRGGIKTVLIPFENKRDLEEIPDNVIADLDIHPVKRIEEVLTLALQNEPSGMQVVTAK

SEQ ID NO: 74895 - protein, 90 aa, Salmonella typhimurium
VNKSQLIEKIAAGADISKAAAGRALDAIIASVTESLKEGDDVALVGFGTFAVKERAARTGRNPQTGKEITIAAAKVPSFRAGKALKDAVN

SEQ ID NO: 74896 - protein, 132 aa, Salmonella typhimurium
MQTQIKVRGYHLDVYQHVNNARYLEFLEEARWDGLENSDSFQWMTARNIAFVVVNININYRRPAVLSDLLTVTSQVQQLNGKSGVLSQTITLEPEGQVVADALITFVCIDLKTQKALPLEGELREKLEQMVQ

SEQ ID NO: 74897 - protein, 326 aa, Salmonella typhimurium
MAFISFPPRHPSSSARLPLTLIALDDWALSTITGVDSEKYIQGQVTADVSQMTEQQHLLAAHCDAKGKMWSTLRLFRERDGFAWIERRSVLEAQLTELKKYAVFSKVVIAPDDERVLLGVAGFQARAALANVFSELPNSENQVVRDGASTLLWFEHPAERFLLVTDVATANMLTEKLHGEAELNNSQQWLALDIEAGIPVIDAANSGQFIPQATNLQALGGISFKKGCYTGQEMVARAKFRGANKRALWLLAGKASRVPEAGEDLELQMGENWRRTGAILAATQLDDGQLLVQAVMNNDLEAESVFRVRDDANTLHIVPLPYSLEE

SEQ ID NO: 74898 - protein, 477 aa, Salmonella typhimurium
MRKLTLPKDFLWGGAVAAHQVEGGWNKDGKGPSICDVLTGGAHGVPREITQNVVAGKYYPNHEAVDFYGHYKEDIRLFAEMGFKCFRTSIAWTRIFPNGDESQPNEAGLKFYDDMFDELLKYNIEPVITLSHFEMPLHLVQHYGGWTNRKVVDFFVRFAEVVFERYKHKVKYWMTFNEINNQRNWRAPLFGYCCSGVVYTEHENPEETMYQVLHHQFVASALAVKAARRINPQMKVGCMLAMVALYPFSCKPEDVMFAQESMRERYVFTDVQLRGYYPSYVLNEWERRGFNIKMEDGDLEVLREGTCDYLGFSYYMTNAVKAEGGSGDAISGFEGSVPNPYVKASDWGWQIDPVGLRYSLCELYERYQKPLFIVENGFGAYDKVEEDGSINDDYRIDYLRAHIEEMKKAVTYDGVDLMGYTPWGCIDCVSFTTGQYSKRYGFIYVNKHDDGTGDMSRSRKKSFNWYKEVIASNGEKL

SEQ ID NO: 74899 - protein, 189 aa, Salmonella typhimurium
MKLVHIVSGLAVAISLAACADKSADIQTPAPNPNMSITANQSTIQQPNVSGTVWIRQKVALPPDAVLTVTLSDASLADAPSKVLSQKAVRTEGKQAPFSFVLPFNPSDIQPNARILLSAAITVDNKLVFITDSVKPVINNGGTKADLTLVPVQQTAVPVQASGGATTTVPSTSPTQVNSSSAVPAPTQY

SEQ ID NO: 74900 - protein, 182 aa, Salmonella typhimurium
MIRQRRRALTPEQQRRFGQQAAARMLSFPPVVMAHTVAVFLSFDGELDTQPLIEQLWRAGKRVYLPVLHPFSPGNLLFLHYYPQSVLVTNRLKIQEPRLDVRDVLPLAKLDVLVTPLVAFDEDGQRLGMGGGFYDRTLQNWQQHKILPVGYAHDCQLVEKLPVKEWDIPLPAVVTPSKIWEW

SEQ ID NO: 74901 - protein, 297 aa, Salmonella typhimurium
MKRPDYRTLQALDAVIRERGFERAAQKLCITQSAVSQRIKQLENMFGQPLLVRTVPPRPTEQGQKLLALLRQVELLEEEWLGDEQTGSTPLLLSLAVNADSLATWLLPALAPVLADSPIRLNLQVEDETRTQERLRRGEVVGAVSIQHQALPSCLVDKLGALDYLFVASKPFAERYFPNGVTRSSLLKAPAVAFDHLDDMHQAFLQQNFDLPPGSVPCHIVNSSEAFVQLARQGTTCCMIPHLQIEKELESGELINLTPGLLQRRMLYWHRFAPESRMMRKVTDALLEYGHKVLRQD

SEQ ID NO: 74902 - protein, 911 aa, Salmonella typhimurium
MSTPSLTRRLWLAFALMAALTLLSTVIGWISLRVISQVEQTNTQALLPTMNMARQLSEASAYELFSAQNLTNADSEGVWLAQGKMLKAQSLKINHLLQALSEQGFNTSAIARQEKEIAQTLGQQGTLVGEILTLRAQQQQLSRQIAEAAESIAAQAHGQANNAATSAGATQAGIYDLIESGKGDQAERALDRLIDIDLEYVNQMNELRVNALRFKQLIVTLKDAQGLSDAEDTDEKLNQLVKILSRRQQRIEDPTVRAQIADALETINQYTTLVTLFRKENAIRDQLQTLMANNLFQFTRFSTEVSQLVNAIEKRNEAGLARLTHASQRGQIGLVILGILALCSLSFILWRVVYRSVSRPLAQQTQALQRLLEGDIDSPFPEAAGVSELDTISRLMEAFRANVRKLNRHREDLAEQVRSQTAELHALVLEHRQARAEAEKANEAKSTFLAAMSHEIRTPLYGILGTVQLLADKPLMTNYRDDLQAINDSGESLLAILNDILDYSAIEVGGTNVSISEEPFEPRQLLNSALHLMHSRVQVALITDFSEQLPSTLQGDPRRIRQIVINLLSNAAKFTDRGSIVLRTFCDDQSWFIEVEDTGCGIPEAKLTAIFKPFVQATGRRGGTGLGLAISASLAEAMGGTLTVTSTLHVGSCFRLQLPVCHSKPASKSAFREPINLNGLRLLLIEDNMLTQRITAEMLTGKGVKVSLAESANDALRCLAEGESFDVALVDFDLPDYDGLTLAQQLMSLYPAMKRIGFSAHVIDDNLRQRTAGLFCGIIQKPVPREELYRMIAHYLQGKSHNARAMLNEHQLAGDMASVGPEKLRQWVALFKDSALPLVEEIEAARAMNDDVNIKRLAHKLKSGCASLGMTQATEACRELELQPLSDIDIKTIVTQGVTALDAWIAGHPSP

SEQ ID NO: 74903 - protein, 86 aa, Salmonella typhimurium
MKPDIHPVYRTVVFHDTSANEYVKVGSTIKTEREIELDGVTYPYVTIDVSSKSHPFYTGRQKTFDSESSAARFQKRFGHFIGAKRG

SEQ ID NO: 74904 - protein, 1120 aa, Salmonella typhimurium
MTMLQLYKRSQHFVFITISVLIILLSCQSLAFARGQTNGDLPSKADVQNQLDTLNKQKDLSAQDKLVQQDLIDTLATLEKIERVKEETVQLRQKVAQAPEKMRQATAALNALSDVDNDDEMRKTLSALSLRQLELRVAQVLDDLQNSQNDLAAYNSQLVSLQTQPERVQNAMYTASQQIQQIRNRLDGNNVGEAALRPSQQVLLQAQQALLNAQIDQQRKSLEGNTVLQDTLQKQRDYVTANSNRLEHQLQLLQEAVNSKRLTLTEKTAQEAISPDETARIQANPLVKQELDINHQLSQRLIVATENGNMLMQQNIKVKNWLDRALQSERNIKEQIAVLKGSLLLSRILYQQQQTLPSADELEDMTNRIADLRLEQFEINQQRDALFQSDAFVDKLEEGHTSEVNDEVHDALLQVVEMRRELLDQLNKQLGNQLMMAINLQVNQQQLMSVSKNLKAILTQQIFWVNSNRPMDWDWLKAFPQTLKEQFSAMKITVNWQKAWPAVFIAFLAGLPLLLIAGLIRWRLKWLKAYQQKLAAAVGSLRNDSQLNTPKAILIDLIRALPVCLIILALGLILLTMQLNISDLLWAFSKKLAMFWLVFGLCWKVLEKEGVAIRHFGMPAQLTSHWRRQIVRISLALLPLHFWSVVAELSPLNLMDDVLGQAVIFLNLLVITLLVWPLCRESWRDKESHGIRLVTVTILSIIPVALMVLTATGYFYTTLRLAGRWIETVYLVIIWNLLYQTVLRGLSVAARRIAWRRALARRQNLVKEGAEGAEPQEEPTIALEQINQQTLRITMLLMLALFGVMFWAIWSDLITVFSYLDSITLWHYNGSEAGAAVVKSVTMGSLLFAIIAAMVAWALIRNLPGLLEVLVLSRLNMRQGASYAITTILNYVIIAVGAMTVFGSLGVSWDKLQWLAAALSVGLGFGLQEIFGNFVSGLIILFERPVRIGDTVTIGTYSGTVSKIRIRATTITDFDRKEVIIPNKAFVTERLINWSLSDTTTRLVIRLGVAYGSDLEKVKRVLLQAAMEHPKVMHDPEPAVFFTTFGASTLDHELRLYVRELRDRSHTVDELNRAIDRLCRENDINIAFNQLEVHLHNAKGDEVTEVKRDLNGGDLAPTAS

SEQ ID NO: 74905 - protein, 235 aa, Salmonella typhimurium
MHPFTSLTLWALAACTTLLLPAQTVLPVYSAAAFLCLLALKSTRRRAKYVAWLMLSLGFGLWLVHGGWLTEWISGQPRDPQRWVYAVTLWLRLLAIVSTSQLWMQYVPVQRFIRALFASRLPPGIAYLFAGPLLVVEQLKRQLTIVHEAQRARGVPLDEGWYQRLRAMPALIVPLTQNALNDLTIRGAALDMRGFRLHRARTTLWAPKDSVLQRVARYGMVLLILAEAGVWIWLR

SEQ ID NO: 74906 - protein, 642 aa, Salmonella typhimurium
MSYQVLARKWRPQTFADVVGQEHVLTALANGLSLGRIHHAYLFSGTRGVGKTSIARLLAKGLNCETGITATPCGVCDNCREIEQGRFVDLIEIDAASRTKVEDTRDLLDNVQYAPARGRFKVYLIDEVHMLSRHSFNALLKTLEEPPAHVKFLLATTDPQKLPVTILSRCLQFHLKALDVEQIRHQLEHILNEEHIAHEPRALQLLSRAADGSLRDALSLTDQAIASGDGQVSTQAVSAMLGTLDDDQALSLVEAVVDANGERVMSLINEAAARGIEWEALLVEMLSLLHRIAMVQLSPAALGSDMAAIEQRMRELARTVPPGDLQLYYQTLLIGRKELPWAPDRRMGVEMTLLRALAFHPRMPLPEPETPRQSFAPVAPTAVMTPPQLQQPSAPAPQTSPAPLPASTSQVLAARNQLQRAQGVTKTKKSEPAAASRARPVNNSALERLASVSERVQARPAPSALETAPVKKEAYRWKATTPVVQTKEVVATPKALKKALEHEKTPELAAKLAAEAIERDPWAAQVSQLSLPKLVEQVALNAWKEQNGNAVCLHLRSTQRHLNSSGAQQKLAQALSDLTGTTVELTIVEDDNPAVRTPLEWRQAIYEEKLAQARESIIADNNIQTLRRFFDAELDEESIRPI

SEQ ID NO: 74907 - protein, 109 aa, Salmonella typhimurium; identical to SEQ ID NO: 56455

SEQ ID NO: 74908 - protein, 201 aa, Salmonella typhimurium
MQTSPLLTQLMEALRCLPGVGPKSAQRMAFTLLQRDRSGGMRLAQALTRAMSEIGHCADCRTFTEQDVCNICSNPRRQENGQICVVESPADIYAIEQTGQFSGRYFVLMGHLSPLDGIGPDDIGLDRLEQRLASEKISELILATNPTVEGEATANYIAELCAEAGVEASRIAHGVPVGGELEMVDGTTLSHSLAGRHKIIF

SEQ ID NO: 74909 - protein, 632 aa, Salmonella typhimurium
MALLRSIHMKGQETRGFQSEVKQLLHLMIHSLYSNKEIFLRELISNASDAADKLRFRALSNPDLYEGDGELRVRVSFDKDKRTLTIADNGVGMNRDEVIDHLGTIAKSGTKSFLESMGSDQAKDSQLIGQFGVGFYSAFIVADKVTVRTRAAGDKPENGVFWESAGEGEYTVADITKNDRGTEITLHLREGEDEFLDDWRVRSIISKYSDHIALPVEIEKREEKDGETVISWEKINKAQALWTRNKSEIKDDEYNEFYKHIAHDFTDPLTWSHNRVEGKQEYTSLLYIPSQAPWDLWNRDHKHGLKLYVQRVFIMDDAEQFMPNYLRFVRGLIDSNDLPLNVSREILQDSTVTRNLRSALTKRVLQMLEKLAKDDAEKYQTFWKQFGLVLKEGPAEDHANQEAIAKLLRFASTHTDSSAQTVSLEDYVSRMKEGQEKIYYITADSYAAAKNSPHLELLRKKGIEVLLLSDRIDEWMMNYLTEFDGKAFQSVAKADESIEKLADEVDENAKEAEKALEPFVERVKTLLGDRVKDVRLTHRLTDTPAIVTTDADEMSTQMAKLFAAAGQSVPEVKYIFELNPDHVLVKRTADTKDEAQFKEWVELLLDQALFAERGTLEDPNQFIRRMNQLLVS

SEQ ID NO: 74910 - protein, 548 aa, Salmonella typhimurium
MDSQRNLLVIALLFVSFMIWQAWEQDKNPQPQTQQTTQTTTTAAGSAADQGVPASGQGKMITVKTDVLDLTINTRGGDVEQALLPAYPKELGSNEPFQLLETTPQFIYQAQSGLTGRDGPDNPANGPRPLYNVEKEAFVLADGQNELQVPMTYTDAAGNTFTKTFVFKRGDYAVNVNYSVQNAGEKPLEVSTFGQLKQSVNLPPHRDTGSSNFALHTFRGAAYSTPDEKYEKYKFDTIADNENLNVSSKGGWVAMLQQYFATAWIPRNDGTNNFYTANLGNGIVAIGYKAQPVLVQPGQTGAMTSTLWVGPEIQDKMAAVAPHLDLTVDYGWLWFISQPLFKLLKWIHSFVGNWGFSIIIITFIVRGIMYPLTKAQYTSMAKMRMLQPKIQAMRERLGDDKQRQSQEMMALYKAEKVNPLGGCFPLIIQMPIFLALYYMLMGSIELRHAPFALWIHDLSAQDPYYILPILMGVTMFFIQKMSPTTVTDPMQQKIMTFMPVIFTVFFLWFPSGLVLYYIVSNLVTIIQQQLIYRGLEKRGLHSREKKKS

SEQ ID NO: 74911 - protein, 454 aa, Salmonella typhimurium
MSHNDTIVAQATPPGRGGVGILRISGLKARDVAQEVLGKLPKPRYADYLPFKDVDGSALDQGIALWFPGPNSFTGEDVLELQGHGGPVILDLLLKRILTLPGVRIARPGEFSERAFLNDKLDLAQAEAIADLIDASSEQAARSALNSLQGAFSARVNHLVEALTHLRIYVEAAIDFPDEEIDFLSDGKIEAQLNGVIADLDAVRTEARQGSLLREGMKVVIAGRPNAGKSSLLNALAGREAAIVTDIAGTTRDVLREHIHIDGMPLHIIDTAGLRDASDEVERIGIERAWQEIEQADRVLFMVDGTTTDAVDPADIWPDFIARLPKNLPITVVRNKADITGETLGISEVNGHSLVRLSARTGEGIDVLRNHLKQSMGFDTNMEGGFLARRRHLQALAEAAEHLEQGKAQLLGAWAGELLAEELRLAQQSLSEITGEFTSDDLLGRIFSSFCIGK

SEQ ID NO: 74912 - protein, 289 aa, Salmonella typhimurium
LTAPYRYKIYKIAKRNSDKKRTIAHPSKELKFIQREITEYLTDKLPVHECAFAYKKGSSIKTNAQVHLHTKYLLKMDFENFFPSITPRLFFSKLRLANIDLTADDKVLLENILFFKSKRNSNLRLSIGAPSSPLISNFVMYFWDIEVQEICSKIGVNYTRYADDLTFSTNNKDVLFDIPDMLENVLPKYSLGRIRINHEKTVFSSKGHNRHVTGITLTNDNKLSIGRERKRKISAMIHHFINGKLSTDECNKLVGLLAFAKNIEPSFYKSMVIKYGSDNIYKLQKQKDK

SEQ ID NO: 74913 - protein, 214 aa, Salmonella typhimurium
MRIILLGAPGAGKGTQAQFIMEKYGIPQISTGDMLRAAVKSGSELGKQAKDIMDAGKLVTDELVIALVKERIAQEDCRNGFLLDGFPRTIPQADAMKEAGIVVDYVLEFDVPDELIVDRIVGRRVHAASGRVYHVKFNPPKVEGKDDVTGEDLTTRKDDQEETVRKRLVEYHQMTAPLIGYYQKEAEAGNTKYAKVDGTQAVADVRAALEKILG

SEQ ID NO: 74914 - protein, 434 aa, Salmonella typhimurium
MKFPGKRKSKHYFPVNARDPLLQQIQPEQETNASWVVGIDQTLVDIEAKVDDDFITRYGLSAGHSLVIEDEVAEKLYQELTRENLITHQFAGGTIGNTMHNYSVLADDRSVLLGVMCSNIEIGSYAYRYLCNTSSRTDLNYLQAVDGPIGRCFTLIGESGERTFAISPGHMNQLRAESIPEAVIAGASALVLTSYLVRCKPGEPMPDATMKAIEYAKKHNVPVVMTLGTKFVIADNPQWWQAFLKENVSILAMNEEEAEALTGENDPLLAADKALDWVDLVLCTAGPIGLYMAGFTEEEAKRKTQHPLLPGAIAEFNQYEFSRAMRHKDCINPLRVYSHIAPYMGGPEKIMNTNGAGDGALAALLHDITANSYHRSNVPNSSKHKFTWLTYSSLAQVCKYANRVSYQVLNQHSPRLTRGLPEREDSLEESYWDR

SEQ ID NO: 74915 - protein, 384 aa, Salmonella typhimurium
MAKHLFTSESVSEGHPDKIADQISDAVLDAILQQDPKARVACETYVKTGMVLVGGEITTSAWVDIEEITRNTVREIGYVHSDMGFDANSCAVLSAIGKQSPDINQGVDRADPLEQGAGDQGLMFGYATNETDVLMPAPITYAHRLVQRQAEVRKNGTLPWLRPDAKSQVTFQYDDGKIVGIDAVVLSTQHAEDIDQKSLQEAVMEEIIKPILPSEWLNTSTKFFINPTGRFVIGGPMGDCGLTGRKIIVDTYGGMARHGGGAFSGKDPSKVDRSAAYAARYVAKNIVAAGLADRCEIQVSYAIGVAEPTSIMVETFGTEKVPAEQLILLVREFFDLRPYGLIQMLDLLHPIYKETAAYGHFGRENFPWEKTDKAQLLRDAAGLK

SEQ ID NO: 74916 - protein, 464 aa, Salmonella typhimurium
MPDNKKQGRSNKAMTFFVCFLAALAGLLFGLDIGVIAGALPFITDEFQITAHTQEWVVSSMMFGAAVGAVGSGWLSFKLGRKKSLMIGAILFVAGSLFSAAAPNVEVLIISRVLLGLAVGVASYTAPLYLSEIAPEKIRGSMISMYQLMITIGILGAYLSDTAFSYSGAWRWMLGVIIIPAILLLIGVFFLPDSPRWFAAKRRFHDAERVLLRLRDTSAEAKRELDEIRESLQVKQSGWALFKENSNFRRAVFLGILLQVMQQFTGMNVIMYYAPKIFELAGYTNTTEQMWGTVIVGLTNVLATFIAIGLVDRWGRKPTLTLGFLVMAIGMGILGTMMHIGIHSPSAQYFAIAMLLMFIIGFAMSAGPLIWVLCSEIQPLKGRDFGITCSTATNWIANMIVGATFLTMLNNLGNANTFWVYAGLNVLFILLTLWLVPETKHVSLEHIERNLMKGRKLREIGAHD

SEQ ID NO: 74917 - protein, 235 aa, Salmonella typhimurium
MYRNFSFAAALLAAAFSGQALADGINNFSQAKAASVKVNADAPGSFYCGCQIRWQGKKGVVDLESCGYKVRKNENRARRIEWEHVVPAWQFGHQRQCWQDGGRKNCAKDPVYRKMESDMHNLQPAIGEVNGDRGNFMYSQWNGGEGQYGQCAMKVDFKAKIAEPPARARGAIARIYFYMRDQYQLKLSRQQTQLFNVWDKQYPVTAWECERDARIAKVQGNHNPYVQRACQARKS

SEQ ID NO: 74918 - protein, 259 aa, Salmonella typhimurium
MPWIAKRRGHDADFFIMRIPRIYHPELLTSGTQISLCEDAANHIGRVLRMGPGQALQLFDGSNQVFDAEIISASKKSVEVQVMKGEIDDRESPLHIHLGQVMSRGEKMEFTIQKSIELGVSLITPLFSERCGVKLDSERLNKKRQQWQKIAIAACEQCGRNRVPEIRPPMALEAWCAEQDSGLKLNLHPRAHASINTLPLPVERVRLLIGPEGGLSADEIAMTARYQFTDILLGPRVLRTETTALTAITALQVRFGDLG

SEQ ID NO: 74919 - protein, 138 aa, Salmonella typhimurium
MSGTLLAFDFGTKSIGVAIGQRITGTARPLPAIKAQDGTPDWTLIERLLKEWQPDEIIVGLPLNMDGTEQPLTARARKFANRIHGRFGVTVTLHDERLSTVEARSGLFERGGYRALNKGKVDSASAVIILESYFEQGY

SEQ ID NO: 74920 - protein, 585 aa, Salmonella typhimurium
MTTRHTEQKYLKLLQHYGDKPVSVTLQELADVLFCTRRHMRNLLLQMQEAKWLIWQSQAGRGHRARLHLRYKPEQLLSEKAEQLLESGHIDQAIQLLGKNKHQVAQLLRSKLGYSVRADYQRLCIPYYRTMPSLCPGIPLRRSEQHLVRQIFSGLTRINEEKGEVEADLAHHWRQIDPLRWRFYLRPAVLWHDGQELTIDAVIASLTRSAKLPLFSHLQTIQATGPLSLEITLAHPDNRLPLLLSHIDAMILPPDHTQRADFPAHPVGTGPYEVVENNGFHLQMKAFDHYFGLRGLLDEVEVFIWPNLTETDNLAESLSDNDTAAWLSSSLSDEDYVSGRLSQVSGKPSDNLREMFLERGGYFLLCDSRSPHWHTAEHRRWLRETLSPYAILQHLSEAIRPFWVPGGSLLSSWFHTIEAGPACSPFISSSPYAKLRLAYHDQHPEFPMLLDIMQEIMRQQGILLEGVELNYDDWANGKANVDLWLGTVNFPIPEEWNVGTWLLGSPLLRHAISGGDDALLAQWETQWHAETISAEQLVRETTRSGWLQPLFHHWMRLKSPDRARGIHLNNLGWFDFRSTWIEPGP

SEQ ID NO: 74921 - protein, 234 aa, Salmonella typhimurium
MNDIAHNLAYIRDKISAAATRCGRSSEEVTLLAVSKTKPASDIAEAIAAGQRAFGENYVQEGVEKIRHFQEAKVEGLHWHFIGPLQSNKSRLVAEHFDWCHTIDRLRIASRLSEQRPDNLPALNVLIQINISDENSKSGIPLAELDELAAAVATLPRLRLRGLMAIPAPESDYVRQFEVARQMAVAFAGLKARYPDVDTLSLGMSDDMEAAIAAGSTMVRIGTAIFGARDYTKN

SEQ ID NO: 74922 - protein, 197 aa, Salmonella typhimurium
MQKVVLATGNAGKVRELASLLSDFGLDVVAQTELGVDSAEETGLTFIENAILKARHAAKMTGLPAIADDSGLAVDVLGGAPGIYSARYSGENATDQQNLEKLLHTLRDVPDDKRQARFHCVLVYLRHAEDPTPIVCHGSWPGVITRQAAGNGGFGYDPIFFVPSEGKTAAELTREEKSAISHRGQALKLLLDALRNG

SEQ ID NO: 74923 - protein, 276 aa, Salmonella typhimurium; identical to SEQ ID NO: 72959

SEQ ID NO: 74924 - protein, 219 aa, Salmonella typhimurium
VDDLLPDLTLAFNETFQMLSISTVLAILGGLPLGFLIFVTDRHLFWQNRFIYLVASVLVNIIRSVPFVILLVLLLPLTQLLLGNTIGPIAASVPLSVAAIAFYARLVDSALREVDKGIIEAALAFGASPMRIICTVLLPEASAGLLRGLTITLVSLIGYSAMAGIVGGGGVGDLAIRYGYYRYETEVMVVTVVALIVLVQVVQMLGDWLAKRADKRDRH

SEQ ID NO: 74925 - protein, 258 aa, Salmonella typhimurium
MLRFSANLSMLFTEYDFLERFDKAALSGFRGVEFMFPYDNDIEVLKRKLRDNNLEHTLHNLPAGDWAAGERGIACIPGREEEFRDGVAAAIRYARALGNKKINCLVGKTPSGFSATEIHDTLVENLRYAANMLAKEDILLLIEPINHFDMPGFHLTGTQQALALIKDIGSDNIKIQYDIYHMQRMEGELTQTMTAWADKIGHLQIADNPRRGEPGTGEINYDFIFNVIKQSGYDGWVGCEYKPLTTTEAGLSWINQYR

SEQ ID NO: 74926 - protein, 622 aa, Salmonella typhimurium
MSTDNKQSLPAITLAAIGVVYGDIGTSPLYTLRECLSGQFGFGVERDAVFGFLSLIFWLLIFVVSIKYLTFVMRADNAGEGGILTLMSLAGRNTSARTTSMLVIMGLIGGSFFYGEVVITPAISVMSAIEGLEIVAPQLDTWIVPLSIIVLTLLFMIQKHGTGMVGKLFAPIMLTWFLILAVLGLRSIIANPEVLHALNPVWAVRFFLEYKTVSFIALGAVVLSITGVEALYADMGHFGKFPIRLAWFTVVLPSLVLNYFGQGALLLKHPEAIKNPFFLLAPDWALIPLLILAALATVIASQAVISGVFSLTRQAVRLGYLSPMRIIHTSEMESGQIYIPFVNWLLYFAVVVVIVSFEHSSNLAAAYGIAVTGTMVLTSILSTTVARKNWHWNKYFVALILIAFLCVDIPLFSANLDKLLSGGWLPLSLGLIMFTIMTTWKSERFRLLRRMHEHGNSLEAMIASLEKSPPVRVPGTAVYMSRALSVIPFALLHNLKHNKVLHERVILLTLRTEDAPYVHNVRRVQIEQLSPTFWRVVASYGWRETPNVEEVFHRCGLEGLSCRMMETSFFMSHESLIVGKRPWYLRLRGKLYLLLQRNALRAPDQFEIPPNRVIELGTQVEI

SEQ ID NO: 74927 - protein, 292 aa, Salmonella typhimurium
MKLGFIGLGIMGSPMAINLARAGHQLHVTTIGPVADELLSLGAVNVETARQVTEFADIIFIMVPDTPQVEDVLFGEHGCAKTSLQGKTIVDMSSISPIETKRFAQRVNEMGADYLDAPVSGGEIGAREGTLSIMVGGEQKVFDRVKPLFDILGKNITLVGGNGDGQTCKVANQIIVALNIEAVSEALVFASKAGADPVRVRQALMGGFASSRILEVHGERMINRTFEPGFKIALHQKDLNLALQSAKALALNLPNTATCQELFNTCAANGGSQLDHSAMVQALELMANHKLS

SEQ ID NO: 74928 - protein, 437 aa, Salmonella typhimurium
MVGGFFILGLSTFNIMLAIIISALFIAAAMVMNGAAGSKYGVPFAMILRGSYGVRGALFPGLLRGGIAAIMWFGLQCYAGSLAFLILIGKIWPGFLTLGGDFKLLGLSLPGLITFLIFWIINVGIGFGGGKVLNKFTAILNPCIYIVFGGMAIWAISLVGIGPILDYLPSGVQKAEHSGFLFLVVINAVVAVWAAPAVSASDFTQNAHSFRAQALGQTLGLIVAYILFAVASVCIIAGASIHYGMDTWNVLDIVQRWDSLFASFFAVLVILMTTISTNATGNIIPAGYQIAALAPTKLNYKNGVMIASIISLLICPWKLMENQDSIYLFLDIIGGMLGPVIGVMLAHYFVVMRGKINLDELYTASGDYKYYDNGFNLTAFSVTLVAVILSLGGKFIPFMEPLSRVSWFVGVIVAFVAYALLKKRTGFENTGEKKLAG

SEQ ID NO: 74929 - protein, 453 aa, Salmonella typhimurium
MSFDLIIKNGTVILENEARVIDIAVQGGKIAAIGENLGEAKNVLDATGLIVSPGMVDAHTHISEPGRTHWEGYETGTRAAAKGGITTMIEMPLNQLPATVDRETIELKFDAAKGKLTIDAAQLGGLVSYNLDRLHELDEVGVVGFKCFVATCGDRGIDNDFRDVNDWQFYKGAQKLGEMDQTVLVHCENALICDELGEEAKREGRVTAHDYVASRPVFTEVEAIRRVLYLAKAAGCRLHVCHISSPEGVEEVTRARQEGQDVTCESCPHYFVLDTDQFEEIGTLAKCSPPIRDQENQKGMWEKLFNGEIDCLVSDHSPCPPEMKAGNIMQAWGGIAGLQNCMDVMFDEAVQKRGMSLPMFGKLMATNAADIFGLKHKGRIAPGKDADLVFIQPDSSYVLKNEDLEYRHKVSPYVGRTIGARITKTILRGDVIYDIEHGFPVPPKGQFILKHQQ

SEQ ID NO: 74930 - protein, 297 aa, Salmonella typhimurium
MKTLVVALGGNALLQRGEALTAENQYRNIADAVPALARLARSYRLAIVHGNGPQVGLLALQNLAWKAVEPYPLDVLVAESQGMIGYMLAQRLALEPDMPPVTAVLTRIKVSADDPAFLEPEKFIGPVYSPEEQMALEATYGWHMKRDGKYLRRVVASPAPRQIIESAAIELLLKEGHVVICSGGGGVPVAGEGEGVEAVIDKDLAAALLAEQIAADGLIILTDADAVYEHWGTPQQRAIRQASPDELAPFAKADGAMGPKVTAVSGYVKRCGKPAWIGALSRIDDTLAGRAGTCICL

SEQ ID NO: 74931 - protein, 461 aa, Salmonella typhimurium
MLKIFNTLTRQKEEFKPIHAGEVGMYVCGITVYDLCHIGHGRTFVAFDVVARYLRFLGYKLKYVRNITDIDDKIIKRANENGESFVALVDRMIAEMHQDFDALNILRPDSEPRATHHIQEIIELTRTLIEKGHAYVADNGDVMFDVPTDPTYGQLSRQDLEQLQAGARVDVVDVKRNPMDFVLWKMSKEGEPSWPSPWGEGRPGWHIECSAMNCKQLGNHFDIHGGGSDLMFPHHENEIAQSTCAHDGEYVNYWMHSGMVMVDREKMSKSLGNFFTVRDVLKYYDAETVRYFLMSGHYRSQLNYSEENLKQARASLERLYTALRGTDKSAAPAGGEAFEARFVEAMNDDFNTPEAYSVLFDMAREVNRLKGEDMTAANAMASHLRKISGVLGLLEQEPDVFLQSGAQADDGEVAEIEALIQQRLDARKAKDWAAADAARDRLAEMGIILEDGPQGTTWRRK

SEQ ID NO: 74932 - protein, 490 aa, Salmonella typhimurium
MEQNIATAQVSVARPNWDKSRLVSRIVHLGCGAFHRAHQALFTHHLLEKSDSDWGICEVNLMPGNDARLIANLKAQNLLYTVAERGAESTELKIIGSMKEALHPEFDGHAGILAAMARPETAIVSLTVTEKGYCTDPASGELDVNNPLIQNDLAHPQQPKSAIGYIVEALNMRREQGLKAFTVLSCDNVRENGHVAKAAVLGLAKARDAALAAWIADNVTFPCTMVDRIVPAATEETLQLVADQLGVYDPCAIACEPFRQWVIEDNFVNGRPDWDTVGAQFVADVVPFEMMKLRMLNGSHSFLAYLGYLGGYDTIADTMTNPAYRRAALALMLDEQAPTLSMPEGTDLEGYANLLIARFTNPSLKHRTWQIAMDGSQKLPQRLLDPVRLHLQQGDDYRRLTLGVAGWMRYVGGVDEQGKTIDVVDPLLAQYQAIHQQYQTPEERVRGLLAIESIFGNDLPKNHEFVQAVTDAYQQLLQNGAKATVEALAK

SEQ ID NO: 74933 - protein, 333 aa, Salmonella typhimurium
MDNFQKDIDDRANLTLSNRFELLLFRLGTSLHEQKSELFGINVFKLREIVPMPAFTRPAGMKAPLLGMVNIRDQVIPVIDLPAVAGCKPETGLNILLITEYARSVQAFAVESVENIMRLDWQQVHTAEKAVNGRYITSIACLDDNKETNNLALVLDVEQILYDIVPSSHDLRATNLKTNKFYITPGAVAIVAEDSKVARAMLEKGLNAMGIPHQMHVTGKDAWERIQQLAQEAEAEGKPISEKIALVLTDLEMPEMDGFTLTRKIKTDERLKKIPVVIHSSLSGSANEDHIRKVKADGYVAKFEINELSSVIQEVLERAATNSQGPLISRKSA

SEQ ID NO: 74934 - protein, 297 aa, Salmonella typhimurium
MQILITGGTGLIGRHLIPRLLTLGHQVTVVTRNPDNARQILDSRVTLWKGLAEREHLNEIDAIINLAGEPIADKRWTSQQKERLCQSRWAITQKLVDLIHASATPPSVLISGSATGYYGDLGDVVVTEDEPPHNEFTHKLCARWEQIACRAQSDQTRVCLLRTGVVLAPQGGILGKMVPPFRLGLGGPVGNGRQYLAWIHIDDMVNGILWLLDNDLRGPFNMVSPYPVHNEHFAHALGRALRRPAIIRIPATAIRLLMGESSVLVLGGQRALPKRLEAAGFAFRWYDLEEALADVIR

SEQ ID NO: 74935 - protein, 873 aa, Salmonella typhimurium
MRNQLFMTRYYSSVTKPVLTPLALAIALAPAPGWAENYFNPAFLSDDPSAVADLSTFSRNAQAAGMYRVDVYLNNTFLATRDIAFQAVKTTGKSAPTDDSGLRACLTPEMLKNMGVNTGAFPLLAKAAAGSCPDLASAIPAARTRFDFAQQRLDISIPQAAMVASARGYIPPKYWDEGINALLLNYTFTGANSQDRSPGGSAENSYFLGLNSGLNLGAWRLRDYSTWNANSGDQNSDSDWQHISTYLERDVVFLQGELTAGDSYTPSALFDSLPFRGLQLASDDNMLPDSMKGFAPTIHGIARSNAQVTIRQNGYIINQRYVPPGAFTINDLYPTAASGDLTVEVKESDGSINRYNVPYSAVPILQREGRLKYAATVAEYRSDSSQKEKVKFSQATLIWGLPHGFTLYGGTQLSSHYHALAIGSGANLGDWGAVSLDVTQATSTLADNNTYQGQSLRFLYAKSLAQSGTNLQLMGYRYSTSGFYTLDDTTWKRMSGYDDDSRTDSDKSRPEWADYYNLYYTRRGKVQLDINQQLGGLGSLFITGSQQSYWHTDEKDSLLQVGYSDTLAGIAWSVSYNNNKSAGDAERDQIFALNISVPLSQWLQHGDEVTRHHNVYATFSTSTDKQHNVTQNAGLSGTLLDENNLSYNIQQGYQNHGIGESGAASLEYDGAKGNANIGYNVSDNGDYQQVNYGLSGGLVAHAHGVTLSQPLGNTNILIAAPGAANVGVVDQPGIHTDARGYAVVPYATTYRQNRMALDVNAMADDVDIDDAVTRVVPTEGALVLARFKARVGARALVTLNHNGKPVPFGATVTVNDRHAEAIVDEAGEVYLSGLSAQGVLHVRWGNLPDQQCVASYHLSSSRQILSRQHAECH

SEQ ID NO: 74936 - protein, 497 aa, Salmonella typhimurium
MKRTVVASMIGLALCAGCVLSTAQAATAKRPNLVIILADDLGYGDLATYGHRIVKTPNIDKLAQEGVKFTDYYAPAPLCSPSRAGLLTGRMPFRTGIRSWIPEGKDVALGRNELTIANLLKQQGYDTAMMGKLHLNAGGDRTDQPQAKDMGFDYTLVNPAGFVTDATLDNAKERPRYGVVHPTGWIRNGQHIGRADKMSGEFVSSEVVNWLDNKKDDNPFFLYVAFTEVHSPLASPKKYLDMYSQYMTDYQKQHPDLFYGDWADKPWRGTGEYYANISYMDEQVGKVLDKIKAMGEEDNTIVIFTSDNGPVTREARKVYELNLAGETDGLRGRKDNLWEGGIRVPAIIKYGKHIPQGMVTDTPVYGLDWLPTLANMMDFKLPTDRTYDGQSLVPLLKDKTLKRQKPLIFGIDMPFQDDPTDEWAIRDGDWKMIIDRQNKPKYLYNLKTDRFETLNQIGKQPQIEKQLYGKFLKYKKDIDNDSLMKARGDKPTPVTWG

SEQ ID NO: 74937 - protein, 312 aa, Salmonella typhimurium
MKLIRGIHNLSQAPHGCVLTIGNFDGVHRGHRALLQGLQEEGRRRGLPVVVMIFEPQPLELFATDKAPARLTRLREKLHYLAQCGVDYVLCVKFDRRFAALTAQTFISELLVERLGVQFLAVGDDFRFGASRAGDFLLLQKAGAEYGFAVSSTQTFCEGGVRISSTAVRQALAEDNLALAESLLGHPFTISGRVVHGDELGRTIGFPTANLPLRRQVSPVKGVYAVEVTGLGDKPLPGVANIGTRPTVAGVRQQLEVHLLDVVMDLYGRHIDVILRKKIRNEQRFASLDELKAQIARDELTARKFFGLAGQV

SEQ ID NO: 74938 - protein, 944 aa, Salmonella typhimurium
MSDYKSTLNLPETGFPMRGDLAKREPGMLARWTDDDLYGIIRAAKKGKKTFILHDGPPYANGSIHIGHSVNKILKDIIVKSKGLSGFDSPYVPGWDCHGLPIELKVEQEFGKPGEKFTAAEFRAKCREYAATQVDGQRKDFIRLGVLGDWSHPYLTMDFKTEANIIRALGRIIKNGHLHKGAKPVHWCVDCRSALAEAEVEYYDKTSPSIDVAFRAVDQDAVKAKFGLPGVSGPVSLVIWTTTPWTLPANRAISLAPDFDYALVQIDGQAVILAKDLVESVMQRIGAAEYTILGTVKGAELELLRFTHPFMGFDVPAILGDHVTLDAGTGAVHTAPGHGPDDYVIGQKYGLETANPVGPDGTYLPGTYPTLDGVNVFKANDIVIELLKEKGALLHVEKMQHSYPCCWRHKTPIIFRATPQWFVSMDKEGLRQQSLKEIKGVQWIPDWGQARIESMVANRPDWCISRQRTWGVPMSLFVHKETQELLPIERTLAAMEEVAKRVEVDGIQAWWDLDPKEILGEDADQYEKVPDTLDVWFDSGSTSYSVVDARPEFAGHAADMYLEGSDQHRGWFMSSLMISVAMKGKAPYRQVLTHGFTVDGQGRKMSKSIGNTVSPQDVMNKLGADILRLWVASTDYTGEMAVSDEILKRAADSYRRIRNTARFLLANLNGFNPATDMVKPEEMVVLDRWAVGCAKTAQQEILKAYEAYDFHEVVQRLMRFCSVEMGSFYLDIIKDRQYTAKADSVARRSCQTALYHIAEALVRWMAPIMSFTADEIWGYLPGEREKYVFTGEWYDGLFGLEENEEFNDAFWDDVRYIKDQVNKELENQKANGIKSNLEAKVTLKYADDANGTIKKLKLLGEEVRFIFITSQFVISEQAGGIDDENIQYNAGNTTVQAVVTRAEGDKCPRCWHYTTDVGKVAEHADICGRCVSNIAGNGEQRKFA

SEQ ID NO: 74939 - protein, 306 aa, Salmonella typhimurium
MTASLHIILDTDPGIDDAAAIAAALFAPQLDLQLITTVAGNVSVEKTTRNALQLLHFWNSDIPLAQGAATPLLRPLRDAAYVHGESGMEGYDFVDHQRQPLAKPAFIAIRDVLMNAPEPMTLVAIGPLTNIALLLMHYPECACNIRRLVLMGGSAGRGNFTPNAEFNIAVDPEAAALVFRSGLEIVMCGLDVTNQAMLSPDFLNKLPALNRTGKMLHSLFNHYRSGSMRTGVRMHDLCAIAWLVRPELFTLQSCFVAVETQGQYTAGTTVVDIEGRLGQPANAQVALALDVDGFRQWVAEVFAYAP

SEQ ID NO: 74940 - protein, 307 aa, Salmonella typhimurium
MEKNGLFSQRIRLRHLHTFVAVAQQGTLGRAAETLNLSQPALSKTLNELEQLTGTRLFERGRLGAQLTVPGEQFLTHAVKVLDALNTAGQALNRKEDASADVVRVGALPTAALGILPAAIGRFHQQQKSTSLQVATMNNTMLLAGLKSGEIDLGIGRMSDPELMGGLNYELLFLESLKLVVRPGHPLLQETITLSRVMEWPVVVSPKGTVPRQNAEALLQSQGCKMPAGCIETLSASLSRQLTVDYDYVWFVPSGAVKEDLRQATLVSLPVPTQSAGEPIGILTRVDIPLSTGAQMLIAAIRKSMPL

SEQ ID NO: 74941 - protein, 437 aa, Salmonella typhimurium
MVMSQKTLFTKSALAVAVAIISTQAWSAGFQLNEFSSSGLGRAYSGEGAIADDAGNVSRNPALITMFDRPTFSAGAVYIDPDVNISGTSPSRRTLDADNIAPTAWVPNVHFVAPINDQFGWGASITSNYGLATEFNDTYAGGSVGGTTDLETMNLNLSGAYRLNEAWSFGLGFDAVYARAKIERFAGDLGQLVAAQNPALAPVAGQIPSDTKIAHLNGNQWGFGWNAGILYELDKNNRYALTYRSEVKIDFKGNYSSDLPIAINRFNLPIPTATGGATQSGYLTLNLPEMWEVSGYNRVAPQWAIHYSLAYTSWSQFQELKAKSTAGDTLFEKHEGFKDAYRIALGTTYYYDDNWTFRTGIAFDDSPVPAQNRSISIPDQDRFWLSAGTTYAFNKDASVDVGVSYMHGQSVKINEGPYQFESEGKAWLFGTNFNYAF

SEQ ID NO: 74942 - protein, 506 aa, Salmonella typhimurium
MKETVTMLNQQYVVPEGLQPYQGVTANSPWLASETEKRRRKICDSLEEAIRRSGLKNGMTISFHHAFRGGDKVVNMVMAKLAEMGFRDLTLASSSLIDAHWPLIEHIKNGVVRQIYTSGLRGKLGEEISAGLMENPVQIHSHGGRVKLIQSGELNIDVAFLGVPCCDEFGNANGFSGKSRCGSLGYAQVDAQYAKCVVLLTEEWVEFPNYPASIAQDQVDLIVQVDEVGDPEKITAGAIRLSSNPRELLIARQAANVIEHSGYFCDGFSLQTGTGGASLAVTRFLEDKMRRHNITASFGLGGITGTMVDLHEKGLIKALLDTQSFDGDAARSLAQNPHHIEISTNQYANPASKGAACERLNVVMLSALEIDVNFNVNVMTGSNGVLRGASGGHSDTAAGADLTIITAPLVRGRIPCVVEKVLTTVTPGASVDVLVTDHGIAVNPARQDLLDNLRAAGVALMTIEQLQQRAEQLTGKPQPIEFTDRVVAVVRYRDGSVIDVIRQVKG

SEQ ID NO: 74943 - protein, 273 aa, Salmonella typhimurium
MHEAQIRVAIAGAGGRMGRQLIQAAMAMEGVQLGAALEREGSSLLGSDAGELAGAGKSGVIVQSSLEAVKDDFDVFIDFTRPEGTLTHLAFCRQHGKGMVIGTTGFDDAGKQAIREASQEIAIVFAANFSVGVNVMLKLLEKAAKVMGDYSDIEIIEAHHRHKVDAPSGTALAMGEAIAGALDKNLKDCAVYSREGYTGERVAGTIGFATVRAGDIVGEHTAMFADIGERVEITHKASSRMTFANGALRSALWLKTKKNGLFDMRDVLGLDVL

SEQ ID NO: 74944 - protein, 382 aa, Salmonella typhimurium
LIKSALLVLEDGTQFHGRAIGATGSAVGEVVFNTSMTGYQEILTDPSYSRQIVTLTYPHIGNVGTNKADEESSQVHAQGLVIRDLPLIASNFRNTEDLSSYLKRHNIVAIADIDTRKLTRLLREKGAQNGCIIAGDSPDAKLALEKAKAFPGLNGMDLAKEVTTAETYRWTQGSWTLKDGLPEAKSEDDLPFHVVAYDFGAKRNILRMLVDRGCRLTVVPAQTSAEEVLKMNPDGIFLSNGPGDPAPCDYAITAIQKFLETDIPLFGICLGHQLLALASGAKTVKMKFGHHGGNHPVKDMDRNVVMITAQNHGFAVDEDSLPANLRVTHKSLFDGTLQGIHRTDKPAFSFQGHPEASPGPHDAAPLFDHFIELIEQYRQSAK

SEQ ID NO: 74945 - protein, 1075 aa, Salmonella typhimurium
MPKRTDIKSILILGAGPIVIGQACEFDYSGAQACKALREEGYRVILVNSNPATIMTDPEMADATYIEPIHWEVVRKIIEKERPDAVLPTMGGQTALNCALELERQGVLEEFGVTMIGATADAIDKAEDRRRFDIAMKKIGLDTARSGIAHTMEEALAVAADVGFPCIIRPSFTMGGTGGGIAYNREEFEEICERGLDLSPTNELLIDESLIGWKEYEMEVVRDKNDNCIIVCSIENFDAMGIHTGDSITVAPAQTLTDKEYQIMRNASMAVLREIGVETGGSNVQFAVNPKNGRLIVIEMNPRVSRSSALASKATGFPIAKVAAKLAVGYTLDELMNDITGGRTPASFEPSIDYVVTKIPRFNFEKFAGANDRLTTQMKSVGEVMAIGRTQQESLQKALRGLEVGATGFDPKVSLDDPEALTKIRRELKDAGADRIWYIADAFRAGLSVDGVFNLTNIDRWFLVQIEELVRLEEKVAEVGITGLNADFLRQLKRKGFADARLAKLAGVREAEIRKLRDQYDLHPVYKRVDTCAAEFATDTAYMYSTYEDECEANPSIDRDKIMVLGGGPNRIGQGIEFDYCCVHASLALREDGYETIMVNCNPETVSTDYDTSDRLYFEPVTLEDVLEIVRIEKPKGVIVQYGGQTPLKLARALEAAGVPVIGTSPDAIDRAEDRERFQHAVDRLKLKQPANATVTAIEQAVEKAKEIGYPLVVRPSYVLGGRAMEIVYDEADLRRYFQTAVSVSNDAPVLLDRFLDDAVEVDVDAICDGEMVLIGGIMEHIEQAGVHSGDSACSLPAYTLSQEIQDVMRQQVQKLAFELQVRGLMNVQFAVKDNEVYLIEVNPRAARTVPFVSKATGVPLAKVAARVMAGKSLTEQGVTQEIIPPYYSVKEVVLPFNKFPGVDPLLGPEMRSTGEVMGVGRTFAEAFAKAQLGSNSTMKKQGRALLSVREGDKERVVDLAAKLLKQGFELDATHGTAIVLGEAGINPRLVNKVHEGRPHIQDRIKNGEYTYIINTTAGRRAIEDSRVIRRSALQYKVHYDTTLNGGFATTMALNADATEKVTSVQEMHAQIKKS

SEQ ID NO: 74946 - protein, 306 aa, Salmonella typhimurium
MFPQSKFSRAFLHPRYWLTWFGVGILWLLVQLPYPVLRFLGTRTGKLARPFLKRRESIAQKNIELCFPTLSREEREKLIAENFHSLGMALLETGMAWFWPDSRVRKWFDVDGLDNLTRAQAQNRGVMVVGVHFMSLELGGRVMGLCQPMMATYRPHNNPLMEWVQTRGRMRSNKAMIGRNNLRGIVGALKKGEAVWFAPDQDYGPKGSSFAPFFAVENVATTNGTYVLSRLSGAAMLTVTMVRKSDNSGYRLYITPEMEGYPADENQAAAYMNKIIEKEIMRAPEQYLWIHRRFKTRPLGEASLYI

SEQ ID NO: 74947 - protein, 411 aa, Salmonella typhimurium
MFHPRARTMLLLSLPALIIGVASSLVLIAAMKVASVFQQFLWQRLPTSIGIAYDSPFWIVGMLTLTGIVVGLIIRYSPGHAGPDPAIEPLISMPVSPSALPGLLLALIIGLAGGVSLGPEHPIMTINIALAAAFGSRLFPRITALDWTILASAGTIGALFGTPVAAALIFSQTLSGSNDIPMWDRLFAPLMAAAAGSLTTSLFFHPHFSLPIAHYTQMRLVDIASGAIVAAIAIAAGMVAVWCLPRLHELLHRLKNPVLILGIGGFILGILGVIGGPLTLFKGLDEMQQMAFSQTLGAGDYFTLAVVKLAALVIAAASGFRGGRIFPAVFIGAALGLMLHAHVEAVPAAITVSCAILGLVLVVTRDGWLSLFMAAVVVPDTNLLPLLCIVMLPAWLLLAGKPLLAANRHEP

SEQ ID NO: 74948 - protein, 332 aa, Salmonella typhimurium
MIYQPDENRYHTMEYRRCGRSGVKLPAISLGLWHNFGDTTRVENSRALLQRAFDLGITHFDLANNYGPPPGSAECNFGRILQEDFLPWRDELIISTKAGYTMWDGPYGDWGSRKYLIASLDQSLKRMGLEYVDIFYHHRPDPETPLKETMKALDHLVRHGKALYVGISNYPADLARQAIDILEDLGTPCLIHQPKYSLFERWVEDGLLALLQEKGVGSIAFSPLAGGQLTDRYLNGIPEDSRAASGSRFLKPEQITADKLEKVRRLNELAARRGQKLSQMALAWVLRNDNVTSVLIGASKPSQIEDAVGMLANRRFSAAECAEIDAILEGRF

SEQ ID NO: 74949 - protein, 144 aa, Salmonella typhimurium
MNRTILVPIDISDSELTQRVISHVEAEAKIDDAKVHFLTVIPSLPYYASLGLAYSAELPAMDDLKAEAKSQLEAIIKKFNLPADRVQAHVAEGSPKDKILEMAKKLPADMVIIASHRPDITTYLLGSNAAAVVRHAECSVLVVR

SEQ ID NO: 74950 - protein, 159 aa, Salmonella typhimurium
MISLIAALAVDRVIGMENAMPWNLPADLAWFKRNTLNKPVVMGRHTWESIGRPLPGRKNIVISSQPGTDDRVQWVKSVDEAIAACGDAPEIMVIGGGRVYEQFLPKAQKLYLTHIDAEVEGDTHFPDYEPDDWESVFSEFHDADAQNSHSYCFEILERR

SEQ ID NO: 74951 - protein, 171 aa, Salmonella typhimurium
MLRLLEEKIATPLGPLWVVCDEQFRLRAIEWEQYRDRMEQLLNIHYRHEGYERVSATNPGGLSDKLADYFAGNLAVIDTLETATGGTPFQREVWQALRAIPCGQVMHYGQLAAQLGRPGAARAVGAANGANPISIVVPCHRVIGRNGTLTGYAGGVQRKEWLLRHEGYLLL

SEQ ID NO: 74952 - protein, 343 aa, Salmonella typhimurium
MFTEFFLKNAFNLAILFSCGMALLVVRFWLSRNVQWKKGFTFHAAQFFIYAIIIGTIGSILNNAIEDYNLRFISSGVIDFICTSLIALILTIKLFLIINQFEKAQVNKGRDVTSTRILARVIKITIIVAIVLLYGEHFGMSLSGLLTFGGIGGIAVGMAGKDVLSNFFSGIMLYFDRPFSIGDWIRSPDRNIEGTVAEIGWRITRINTFDHRPLYVPNSVFSSISVENPGRMTNRRIKTVIGLRYEDADKIGLIVDAIRNMLQAHRDIDQKQTLLVYFNEFADSSLNIMVYCFTKTTVWQEWLAVQQDVYLKIIAIVQENGADFAFPSQTLYIDDPEAAPATK

SEQ ID NO: 74953 - protein, 281 aa, Salmonella typhimurium; identical to SEQ ID NO: 72876

SEQ ID NO: 74954 - protein, 139 aa, Salmonella typhimurium
MKKGTVLNSEISSVISRLGHTDTLVVCDAGLPIPNSTARIDMALTQGVPSFMQVVDVVTREMQVEAAILATEIKQQNPQLHETLLTHLEQLQQHQGNTIKISYTTHEQFKKLTADSQAVIRSGECSPYANVILCAGVTF

SEQ ID NO: 74955 - protein, 321 aa, Salmonella typhimurium
MTTQAVSGRRYFTKAWLLEQKSLIALLVLIAIVSTLSPNFFTVNNLFNILQQTSVNAIMAVGMTLVILTSGIDLSVGSLLALTGAVAASIVGVEVNALVAVAAALALGAAIGAVTGVIVAKGRVQAFIATLVMMLLLRGVTMVYTDGSPVNTGFTDNADLFGWFGIGRPLGVPTPVWIMAIVFIAAWYMLHHTRLGRYIYALGGNEAATRLSGISVSKVKIIVYSLCGLTASLAGIIEVARLSSAQPTAGTGYELDAIAAVVLGGTSLAGGKGRIVGTLIGALILGFLNNGLNLLGVSSYYQMIVKAVVILLAVLVDNKKQ

SEQ ID NO: 74956 - protein, 296 aa, Salmonella typhimurium
MNMKKLATLVSAVALSATVSANAMAKDTIALVISTLNNPFFVSLKDGAQKEADKLGYNLVVLDSQNNPAKELANVQDLTVRGTKILLINPTDSDAVGNAVKMANQAKIPVITLDRQATKGDVVSHIASDNVLGGKIAGDYIAKKAGEGAKVIELQGIAGTSAARERGEGFQQAVAAHKFNVLASQPADFDRTKGLNVMQNLLTAHPDVQAVFAQNDEMALGALRALQTAGKADVMVVGFDGTPDGEKAVKDGKLAATIAQLPDQIGAKGVEVADKVLKGEKVQAKYPVDLKLVIKQ

SEQ ID NO: 74957 - protein, 548 aa, Salmonella typhimurium
MNGAQWVVHALRAQGVKTVFGYPGGAIMPVYDALYDGGVEHLLCRHEQGAAMAAIGYARSTGKTGVCIATSGPGATNLITGLADALLDSVPVVAITGQVSAPFIGTDAFQEVDVLGLSLACTKHSFLVQSLEELPRIMAEAFEVANAGRPGPVLVDIPKDIQLASGELEPWFTTVANEATFPQADVEQARQMLEQAKKPMLYVGGGVGMAQAVPALRKFIAVTQMPVTCTLKGLGAVEADYPYYLGMLGMHGTKAANFAVQECDLLIAVGARFDDRVTGKLNTFAPNASVIHMDIDPAEMNKLRQAHVALQGDLNSLLPALQQPLKIDAWRQSCAELRAEHAWRYDHPGETIYAPLLLKQLSERKPADSVVTTDVGQHQMWSAQHMTYTRPENFITSSGLGTMGFGLPAAVGAQVARPNDTVICISGDGSFMMNVQELGTVKRKQLPLKIVLLDNQRLGMVRQWQQLFFQERYSETTLTDNPDFLMLASAFGIPGQHITRKDQVEAALDTMLASEGPYLLHVSIDELENVWPLVPPGASNSEMLEKLS

SEQ ID NO: 74958 - protein, 309 aa, Salmonella typhimurium
MTTKKADYIWFNGEMVRWEDAKVHVMSHALHYGTSVFEGIRCYDSHKGPVVFRHREHMQRLRDSAKIYRFPVSQSIDELMEACRDVIRKNNLTSAYIRPLVFVGDVGMGVNPPPGYTTDVIIAAFPWGAYLGAEALDQGIDAMVSSWNRAAPNTIPTAAKAGGNYLSSLLVGSEARRHGYQEGIALDVNGYISEGAGENLFEVKDGVLFTPPFTSSALPGITRDAIIKLAKELGIEVREQVLSRESLYLADEVFMSGTAAEITPVRSVDGIQVGEGRCGPVTKRIQQAFFGLFTGETEDKWGWLDPVNS

SEQ ID NO: 74959 - protein, 616 aa, Salmonella typhimurium
MPKYRSATTTHGRNMAGARALWRATGMTDSDFGKPIIAVVNSFTQFVPGHVHLRDLGKLVAEQIEASGGVAKEFNTIAVDDGIAMGHGGMLYSLPSRELIADSVEYMVNAHCADAMVCISNCDKITPGMLMASLRLNIPVIFVSGGPMEAGKTKLSDKIIKLDLVDAMIQGADPKVSDDQSNQVERSACPTCGSCSGMFTANSMNCLTEALGLSQPGNGSLLATHADRKQLFLNAGKRIVELTKRYYEQNDESALPRNIASKAAFENAMTLDIAMGGSTNTVLHLLAAAQEAEIDFTMSDIDKLSRKVPQLCKVAPSTQKYHMEDVHRAGGVLGILGELDRAGLLNRNVKNVLGLTLPQTLEQYDITVTQDEAVKKMFRAGPAGIRTTQAFSQDCRWDSLDDDRAAGCIRSLEYAYSKDGGLAVLYGNFAENGCIVKTAGVDDSILKFTGPAKVYESQDDAVEAILGGKVVEGDVVVIRYEGPKGGPGMQEMLYPTSFLKSMGLGKACALITDGRFSGGTSGLSIGHVSPEAASGGTIALIEDGDTIAIDIPNRSIQLQLSEAEIAARREAQEARGDKAWTPKNRQRQVSFALRAYASLATSADKGAVRDKSKLGG

SEQ ID NO: 74960 - protein, 185 aa, Salmonella typhimurium
MKHKLMTSTIASLMFVAGAAVAADPTPVSVSGGTIHFEGKLVNAACAVSTKSADQTVTLGQYRTASFTAIGNTTAQVPFSIVLNDCDPKVAANAAVAFSGQADNTNPNLLAVSSADNSTTATGVGIEILDNTSSPLKPDGATFSAKQSLVEGTNTLRFTARYKATAAATTPGQANADATFIMKYE

SEQ ID NO: 74961 - protein, 230 aa, Salmonella typhimurium
MLNSIKVGFIVLLTLFTSLNVQAAGGIALGATRVIYPSAAKQTSLAISNSDTQERYLVNSWIENNAGQKEKTFIVTPPLFVSEPKSENTLRIIYAGQPLPGDRESLFWMNVKAIPSVDKSHIEGKNVLQLAILSRIKLFVRPANLPQTPEDAPTLLKFSRVGNHLKITNPSAYYLTLVNISVGAKKIDNVMIAPKSDMQIPLPTGAQGNVTFQSVNDYGALTSATTASLG

SEQ ID NO: 74962 - protein, 870 aa, Salmonella typhimurium
MKKTTWFAGRFPGYVSPLSSVALSVLAALCPLTSRGESYFNPAFLSADTASVADLSRFEKGNHQPPGIYRVDIWRNDEFVATQDIRFEAGAVGTGDKSGGLMPCFTPEWIKRLGVNTAAFPVSDKGVDTTCIHLPEKIPGAEVAFDFASMRLNISLPQASLLNSARGYIPPEEWDEGIPAALINYSFTGSRGTDSDSYFLSLLSGLNYGPWRLRNNGAWNYSKGDGYHSQRWNNIGTWVQRAIIPLKSELVMGDSNTGNDVFDSVGFRGARLYSSDNMYPDSLQGYAPTVRGIARTAAKLTIRQNGYVIYQSYVSPGAFAITDLNPTSSSGDLEVTVDEKDGSQQRYTVPYSTVPLLQREGRVKYDLVAGDFRSGNSQQSSPFFFQGTVIAGLPAGLTAYGGTQLADRYRAVVVGAGRNLGDWGAVSVDVTHARSQLADDSTHQGQSLRFLYAKSLNNYGTNFQLLGYRYSTRGFYTLDDVAYRSMEGYDYEYDSDGRRHKVPVAQSYHNLRYSKKGRFQVNISQNLGDYGSLYLSGSQQNYWNTADTNTWYQLGYASGWQGISYSLSWSWSESVGSSGADRILAFNMSVPFSVLTGRRYARDTILDRTYATFNANRNRDGDNSWQTGVGGTLLEGRNLSYSVTQGRSSSNGYSGSASASWQATYGTLGVGYNYDRDQHDYNWQLSGGVVGHADGITFSQPLGDTNVLIKAPGAKGVRIENQTGVKTDWRGYAVMPYATVYRYNRVALDTNTMDNHTDVENNVSSVVPTEGALVRAAFDTRIGVRAIITARLGGRPLPFGAIVRETASGITSMVGDDGQIYLSGLPLKGELFIQWGEGKNARCIAPYALAEDSLKQAITIASATCIRPAS

SEQ ID NO: 74963 - protein, 491 aa, Salmonella typhimurium
MANYFNTLNLRQQLAQLGKCRFMGRDEFADGASYLQGKKVVIVGCGAQGLNQGLNMRDSGLDISYALRKEAIAEKRASWRKATENGFKVGTYEELIPQADLVVNLTPDKQHSDVVRSVQPLMKDGAALGYSHGFNIVEVGEQIRKDITVVMVAPKCPGTEVREEYKRGFGVPTLIAVHPENDPQGEGMAIAKAWAAATGGHRAGVLESSFVAEVKSDLMGEQTILCGMLQAGSLLCFDKLVAEGTDPAYAEKLIQFGWETITEALKQGGITLMMDRLSNPAKLRAYALSEQLKEIMAPLFQKHMDDIISGEFSSGMMADWANDDKKLLTWREETGKTAFETAPQYEGKIGEQEYFDKGVLMIAMVKAGVELAFETMVDSGIIEESAYYESLHELPLIANTIARKRLYEMNVVISDTAEYGNYLFSYACVPLLKPFMAELQPGDLGSAIPEGAVDNAQLRDVNDAIRSHAIEQVGKKLRGYMTDMKRIAVAG

SEQ ID NO: 74964 - protein, 674 aa, Salmonella typhimurium
MRLNPGQQHAVEFVTGPCLVLAGAGSGKTRVITNKIAHLIRGCGYQARHIAAVTFTNKAAREMKERVGQTLGRKEARGLMISTFHTLGLDIIKREYAALGMKSNFSLFDDTDQVALLKELTEGLIEDDKVLLQQLISTISNWKNDLKTPAQAAAGAKGERDRIFAHCYGLYDAHMKACNVLDFDDLILLPTLLLQRNDEVRERWQNKIRYLLVDEYQDTNTSQYELVKLLVGQRARFTVVGDDDQSIYSWRGARPQNLVLLSQDFPALQVIKLEQNYRSSGRILKAANILIANNPHVFEKRLFSELGYGAELKVLSANNEEHEAERVTGELIAHHFVNKTQYKDYAILYRGNHQSRVFEKFLMQNRIPYKISGGTSFFSRPEIKDLLAYLRVLTNPDDDSAFLRIVNTPKREIGPATLQKLGEWAMTRNKSLFTASFDMGLSQKLTGRGYDSLTRFTHWLGEIQRLAEREPVAAVRDLIHGIDYESWLYETSPSPKAAEMRMKNVNQLFSWMTEMLEGNELDEPMTLTQVVTRFTLRDMMERGESEEELDQVQLMTLHASKGLEFPYVYMVGMEEGFLPHQSSIDEDNIEEERRLAYVGITRAQKELTFTLCKERRQYGELVRPEPSRFLLELPQDDLIWEQERKVVSAEERMQKGQSHLANLKAMMAAKRAKS

SEQ ID NO: 74965 - protein, 419 aa, Salmonella typhimurium; identical to SEQ ID NO: 73456

SEQ ID NO: 74966 - protein, 367 aa, Salmonella typhimurium
VKLLTALSELISIFLFTTIFIFLARKVAIKIGLVDKPNFRKRHQGVIPLVGGISVFAGICFMFGLSDYYIPHLSLYLICAGVLVFVGAMDDRFDISVKIRAVVQAVIAVVMMVIAKLHLGSLGYIFGPWELVLGPFGYFLTLFAVWAAINAFNMVDGIDGLLGGLSSVSFAAMGLILWFDGQTSLAMWCFAMIAAILPYIMLNLGILGRRYKVFMGDAGSTLIGFTVIWLLLETTQGKTHSISPVTALWIIAIPLMDMVAIMYRRLRKGMSPFSPDRQHIHHLVMRAGFTSRQAFVLITLAAAILAGVGVTAEYSHFVPEWVMLVLFLLAFFLYGYCIKRAWKVARFIKRVKRRLRRQRENRPNLTK

SEQ ID NO: 74967 - protein, 348 aa, Salmonella typhimurium
MTQPLPGARAVSAENELDIRGLFRTLWAGKFWIIGIGLLFALIALAYTFFARQEWSATAITDRPTVNMLGGYYSQQQFLRNLDIKTDPASSDKPSVMDEAYKEFIMQLASWDTRRDFWLQTDYYKQRMVGNSKADAAMLDELINNIQFTPGDFTRAINDNVKLIAETAPDANNLLRQYVAFASQRAASHLNDELKGAWAARTVQMKAQVKRQEEVAKAIYSRRVNSIEQALKIAEQHNISRSATDVPADELPDSELFLLGRPMLQARLENLQAVGPAFDLDYFQNRAMLNTLNVGPTLDPRFQTYRYLRTPEEPVKRDSPRRAFLMIMWGIVGALIGAGVALTRRRTI

SEQ ID NO: 74968 - protein, 246 aa, Salmonella typhimurium
MTNNAAAPLYSLRGLPLIGWRDMSHALNYLFADGQLKQGTLVAINAEKLLTAEDNPEVRALIAAAEFKYADGISVVRSIRKKFPQAQVSRVAGADLWEALMARAGKEGTPVFLVGGKPEVLAQTEAKLRTQWNVNIVGSQDGYFTPEQRQALFARIHASGAKIVTVAMGSPKQELLMRDCREVHPHALYMGVGGTYDVFTGHVKRAPKIWQNLGLEWLYRLLSQPRRITRQMRLLRYLRWHYTGDL

SEQ ID NO: 74969 - protein, 300 aa, Salmonella typhimurium
MTDVALSQDVSRFLRYLGVERQLSPITLLNYQRQLDAIIALAGETGLKSWQQCDAAIVRSFAVRSRRKGLGPASLALRLSALRSFFDWLVSQGELKANPAKGVSAPKAPRHLPKNIDVDDVNRLLDIDLNDPLAVRDRAMLEVMYGAGLRLSELVGLDIKHLDLDTGEVWVMGKGSKERRLPIGRNAVTWIEHWLDLRGLFASDEEALFLSKLGKRISARNVQKRFAEWGIKQGLNSHVHPHKLRHSFATHMLESSGDLRGVQELLGHANLSTTQIYTHLDFQHLASVYDAAHPRAKRGK

SEQ ID NO: 74970 - protein, 238 aa, Salmonella typhimurium; identical to SEQ ID NO: 72668

SEQ ID NO: 74971 - protein, 1294 aa, Salmonella typhimurium
MTQRLPLVAAQPGIWMAEKLSDLPSAWSVAHYVELNGELDAALLAKAVAVGMQQADTLRMRFTEENGEVWQWIDPEHTFGEPPIADLRDQPDPHHAALALMQADLRQNLRADSGKPLAFHQLIRIDDTRWYWYQRYHHLLVDGFSFPAITRQIAAIYRAWQSDAPTPESPFTPFADVVEEYQRYRQSEAWQRDGAFWAQQRRELPPPASMSAAPLPGRSASADILRMKLSAPAGAFRQLAAHMPEIPRADLALALVTLWLGRLCGRMDYAAGFIFMRRMGSAALTATGPVLNVLPLAVNLHATEDLPTLAKRLAAQLKKMRRHQRYDAEQIVRDSGRAAGETPLFGPVLNIKVFDYHLDLPGIQAQTHTLATGPVNDLELALFPDENGGLDIELLANAQRYDDATLSRHALRLMALITQFADNPALRCGDAQMLLAEEQTQLAHLNNTAVTIPAATLSDLVAQQAQKTPEASALADAHYHFTYREMREQVVALAYALRERGVQPGDSVAVALPRSVFLTLALHGIVEAGAAWLPLDTGYPDDRLRMMLEDAQPKLLITTQAQLARFHDIPGMEYLCYSQPLPVSDATPLRLSLPHHTAYIIFTSGSTGRPKGVMVGQTAIVNRLLWMQDHYPLTADDVVAQKTPCSFDVSVWEFFWPFIAGAKLVMAEPEAHRDPLAMQRFFAQYGVTTTHFVPSMLAAFIASLTPASAGKSCASLKRVFCSGEALPTALCREWETLTNAPLHNLYGPTEAAVDVSWYPACGDELAAVDGNSIPIGYPVWNTGLRILDAHMQPVPPGVAGDLYLTGIQLAQGYLGRPDLTASRFIADPFAPGERMYRTGDVARWLDSGAVEYLGRSDDQLKIRGQRIELGEIDRVMQTLPDVEQAVAHACVFNQAAATGGDARQLVGYLVSHSGLPLDLPALQEKLRQKLPAHMVPVVLLQLASLPLSANGKLDRKALPLPDLAPRVKGRAPQSATEIAVAAAFSRLLGCEINDVESDFFALGGHSLLAMKLAAQLSQTFNRQVTPGQVMVASDVAQLSKLLDTDDDERSRNLGFGPLLPLRESDGPTLFCFHPASGFAWQFSVLSRYLSPSWSIMGIQSPRPAGPMQTATTLDEVCEHHLATLLARQPHGPYYLLGYSLGGTLAQGIAARLRARGETVAFLGLLDTWPPETQNWREKEANGLNPDVLAEIERERAAFVAAQQGNASDALFTAIEGNYADAVRLLTTAHSVPFDGHATLFVADKTVPEGVSPEQSWSPWIASLAIYRQPCAHVDIISPSAFETIGPIISELINK

SEQ ID NO: 74972 - protein, 720 aa, Salmonella typhimurium
MDVSYLLDSLNDKQREAVAAPRSNMLVLAGAGSGKTRVLVHRIAWLLSVENNSPYSIMAVTFTNKAAAEMRHRIGQLMGTSQGGMWVGTFHGLAHRLLRAHHMDANLPQDFQILDSEDQMRLLKRLIKAMNLDEKQWPPRQAMWYINSQKDEGLRPHHIQSYGNPVEQTWQKVYQAYQEACDRAGLVDFAELLLRAHELWLNKPHILQHYRERFTNILVDEFQDTNNIQYAWVRLLAGDTGKVMIVGDDDQSIYGWRGAQVENIQRFLNDFPGAQTIRLEQNYRSTSNILSAANALIENNNGRLGKKLWTDGVDGEPISLYCAFNELDEARFVVNRIKTWQDNGGALAQCAILYRSNAQSRVLEEALLQASMPYRIYGGMRFFERQEIKDALSYLRLIANRNDDAAFERVVNTPTRGIGDRTLDVVRQTSRDRQLTLWQVCRELLQEKALAGRAASALQRFMELIDALAQETADMPLHVQTDRVIKDSGLRTMYEQEKGEKGQTRIENLEELVTATRQFSYNDEDEDLMPLQAFLSHAALEAGEGQADTWQDAVQLMTLHSAKGLEFPQVFIVGMEEGMFPSQMSLDEGGRLEEERRLAYVGVTRAMQKLTLTYAETRRLYGKEVYHRPSRFIGELPEECVEEVRLRATVSRPVSHQRMGTPLAENDTGYKLGQRVRHAKFGEGTIVNLEGSGEHSRLQVAFQGQGIKWLVAAYAKLETV

SEQ ID NO: 74973 - protein, 615 aa, Salmonella typhimurium
MVNGVNVAQAEVLNLESGAKQVLQETFGYQQFRPGQEAIIDTALSGRDCLVVMPTGGGKSLCYQIPALLLDGLTVVVSPLISLMKDQVDQLLANGVAAACLNSTQSREQQLEVMAGCRTGQIRLLYIAPERLMLDNFLDHLAHWNPVLLAVDEAHCISQWGHDFRPEYAALGQLRQRFPALPFMALTATADDTTRQDIIRLLGLNDPLIQISSFDRPNIRYMLMEKFKPLDQLMRYVQEQRGKSGIIYCNSRAKVEDTAARLQSRGISAAAYHAGLENAIRVDVQEKFQRDDLQIVVATVAFGMGINKPNVRFVVHFDIPRNIESYYQETGRAGRDGLPAEAMLFYDPADMAWLRRCLEEKPAGQLQDIERHKLNAMGAFAEAQTCRRLVLLNYFGEGRQEPCGNCDICLDPPKQYDGLNDAQIALSTIGRVNQRFGMGYVVEVIRGANNQRIRDFGHDKLKVYGMGREKSHEHWVSVIRQLIHLGLVMQNIAQHSALQLTDAARPVLRGDVPLKLAVPRIVALKPRVMQKSFGGNYDRKLFAKLRKLRKAIADEENIPPYVVFNDATLIEMAEQMPVSASEMLSVNGVGMRKLERFGKEFMALIRAHVDGDDEE

SEQ ID NO: 74974 - protein, 536 aa, Salmonella typhimurium
MRIPFTRWPDEFARRYREKGYWQDVPLTDILTRHADSDKTAVIEGERAFSYRQLNQAADNLACSLRRQGIKPGETALVQLGNVPELYITFFALLKLGVAPVLALFSHQRTELNAYAMQIAPTLVIADRQHTLFAGEDFLNTFVAEHRSVRVVLLRNDDGDHSLDAAMRQAAEDFTATPSPADEVAYFQLSGGTTGTPKLIPRTHNDYYYSVRRSNEICGFNEDTRFLCAIPAAHNYAMSSPGALGVFLAKGTVVLATDPSATLCFPLIEKHQINATALVPPAVSLWLQAIQEWGGNAPLASLRLLQVGGARLSATLAARIPAEIGCQLQQVFGMAEGLVNYTRLDDSPERIINTQGRPMCPDDEVWVADADGNPLPPGEIGRLMTRGPYTFRGYFNSPLHNASAFDANGFYCSGDLISIDQDGYITVHGREKDQINRGGEKIAAEEIENLLLRHPVVIHAALVSMEDELLGEKSCAYLVVKEPLRAVQVRRFLREQGVAEFKLPDRVECVASLPLTPVGKVDKKQLRQRLASRSPL

SEQ ID NO: 74975 - protein, 65 aa, Salmonella typhimurium; identical to SEQ ID NO: 72670

SEQ ID NO: 74976 - protein, 251 aa, Salmonella typhimurium; identical to SEQ ID NO: 73251

SEQ ID NO: 74977 - protein, 187 aa, Salmonella typhimurium; identical to SEQ ID NO: 73306

SEQ ID NO: 74978 - protein, 759 aa, Salmonella typhimurium
MSNETGHLNRRSFLKGIVALGAVAALPGGLLTSRCALAQPPVPFNPKTYKIYRNACPRNCYDTCSLKTWVKDGVITFVEGAPESTFTHGTPCVKGLSYPRRVYSPDRIKYPMTQDVRGSGNWRRISWEEAMQRIAAKMLEIKKKDGSMLGLALTKYSGKFGVLNYAVEGMMSSLGYTTRFAGTPCWPAGIDAQNYDMGDMWCNDPEDMVKAKYIIIWGANPAWCSMHSMKYIYQAREKGAKVVVIDPLLSQTAAKADLYLRVRPGSDGALALGMARHLVDKGLVDQDFVNNDAHGYPEFEAYLRNHVTVEWAAEICGLSADVIRQLAEEFTAVKPATVWIGYGMQRHVNGGANVRAIDAFVAMSGNIGVEGGGARYGHLHTWGFNYNAMLQKPPVGAIGIPGAAGTTSEFGAAAGSDAVQYSDRSLNINQTAQGILEANDPPVRMLWVACKNPFAQDFDRSKMKKAFEKLEMVVCADQFFNETVQHADIVLPVTTAFEEWNVDASYWHYWLSINQPAIKPMYEAKCDLEIATMLSRTINKMAPGSCTFPQEFDHKRWLDQEFNDGMAKMFGISSWDDLLDGPKKAILPSSAAWYDRKFKTPSGKYEFKSELAEKNGHTALPEYKPEAESKLPFHLFTPHVQFGLHSQFINLDWMQVFYPEPFVYIHPSSAKKKGISENDLVKVFNGTGEVELRAKVTTNVPEDFLVMYEAWFPKRQYNVQNVVADTPADMGLMKTGAPGAAIHSQFADVVLIGKGESVA

SEQ ID NO: 74979 - protein, 233 aa, Salmonella typhimurium
MTTLSCKVTSVEAITDTVYRVRLVPDAAFSFRAGQYLMVVMDERDKRPFSMASTPDEKGFIELHIGASELNLYAMAVMDRILKDREIVVDIPHGDAWLRDDEERPLILIAGGTGFSYVRSILLTALARNPARDVTIYWGGREEKHLYDLSELEALSVNHPNLRIEPVVEQPEEGWRGRTGTVLTAVLQDYGTLAGHDIYIAGRFEMAKIARDLFCHERNAREDRLFGDAFAFI

SEQ ID NO: 74980 - protein, 294 aa, Salmonella typhimurium
MSHLYDPTTQYYTGEYPKQKQPAPGVQAKMTPVPDCGEKSYVGSGRLKDRKALVTGGDSGIGRAAAIAYAREGADVAINYLPAEEEDAQQVKALIEECGRKAVLLPGDLSDESFARSLVHKAREALGGLDILALVAGKQTAIPEIKDLTSEQFQQTFAVNVFALFWITQEAIPLLPKGASIITTSSIQAYQPSPHLLDYAATKAAILNYSRGLAKQVAEKGIRVNIVAPGPIWTALQISGGQTQDKIPQFGQQTPMKRAGQPAELAPVYVYLASQESSYVTAEVHGVCGGEHLG

SEQ ID NO: 74981 - protein, 327 aa, Salmonella typhimurium
MKNTRSFTTSAVLLAGCLLLAFPALAKTTLKLSHNQDKSHAVHKAMSYLADKAKAYSDGELNIRIYPNATLGNERESLELMNSGALQMVKVNAASLESFAPEYSVFSLPFLFRDRDHYYNVLKSDLGKRILASSESKGFVGLTWYDGGARSFYAGKPITQPDDLAGMKIRVQQSPSAIAMVKALGGVPTPMAQGELYTALQQGVVDGGENNPVVYADMRHAEVAKFYSRDEHTMVPDVLVISTKVLNKLSDKERKALYKAADESMQQMKDVIWPAAEKEAYESMKAMNATVVDIDKSAFKQRVKPLFDEFRAKDAQSAKDLEYIENM

SEQ ID NO: 74982 - protein, 323 aa, Salmonella typhimurium
MSKIYEDNSLTIGHTPLVRLNRIGNGRILAKVESRNPSFSVKCRIGANMIWDAEKRGVLKPGVELVEPTSGNTGIALAYVAAARGYKLTLTMPETMSIERRKLLKALGANLVLTEGAKGMKGAIQKAEEIVASDPQKYLLLQQFSNPANPEIHEKTTGPEIWEDTDGQVDVFISGVGTGGTLTGVTRYIKGTKGKTDLITVAVEPTDSPVIAQALAGEEIKPGPHKIQGIGAGFIPGNLDLKLIDKVVGITNEEAISTARRLMEEEGILAGISSGAAVAAALKLQEDESFTNKNIVVILPSSGERYLSTALFADLFTEKELQQ

SEQ ID NO: 74983 - protein, 85 aa, Salmonella typhimurium
MFQQEVTITAPNGLHTRPAAQFVKEAKGFTSEITVTSNGKSASAKSLFKLQTLGLTQGTVVTISAEGEDEQKAVEHLVKLMAELE

SEQ ID NO: 74984 - protein, 575 aa, Salmonella typhimurium
MISGILASPGIAFGKALLLKEDEIVIDRKKISADKVDQEVERFLSGRAKASAQLEAIKTKAGETFGEEKEAIFEGHIMLLEDEELEQEIIALIKDKHMTADAAAHEVIEGQATALEELDDEYLKERAADVRDIGKRLLRNILGLAIIDLSAIQEEVILVAADLTPSETAQLNLQKVLGFITDAGGRTSHTSIMARSLELPAIVGTGSVTAQVKNGDYLILDAVNNQVYVNPTNDVIEQLRAVQEQVATEKAELAKLKDLPAITLDGHQVEVCANIGTVRDVEGAERNGAEGVGLYRTEFLFMDRDALPTEEEQFAAYKAVAEACGSQAVIVRTMDIGGDKELPYMNFPKEENPFLGWRAVRIAMDRKEILRDQVRAILRASAFGKLRIMFPMIISVEEVRALRKEIEIYKQELRDEGKAFDESIEIGVMVETPAAATIARHLAKEVDFFSIGTNDLTQYTLAVDRGNDMISHLYQPMSPSVLNLIKQVIDASHAEGKWTGMCGELAGDERATLLLLGMGLDEFSMSAISIPRIKKIIRNTNFEDAKVLAEQALAQPTTDELMTLVNKFIEEKTIC

SEQ ID NO: 74985 - protein, 413 aa, Salmonella typhimurium
VKIYLVGGAVRDALLGLPVKDKDWVVVGATPQEMLDAGYQQVGRDFPVFLHPQTHEEYALARTERKSGSGYTGFTCYAAPDVTLEADLQRRDLTINALARDDAGQIIDPYHGRRDLEARLLRHVSPAFGEDPLRVLRVARFAARYAHLSFRIADETLALMREMTAAGELEHLTPERVWKETENALTTRNPQVYFQVLRDCGALRVLFPEIDALFGVPAPAKWHPEIDTGVHTLMTLSMAAMLSPQLDVRFATLCHDLGKGLTPKNLWPRHHGHGPAGVKLVEQLCQRLRVPNDLRDLAKLVAEYHDLIHTFPILQPKTIVKLFDAIDAWRKPQRVEQIALTSEADVRGRTGFEASDYPQGRWLREAWQVAQAVPTKEVVEAGFKGIEIREELTKRRIAAVANWKEKRCPNPAS

SEQ ID NO: 74986 - protein, 203 aa, Salmonella typhimurium
MSAIAPGMILFAYLCGSISSAILVCRIAGLPDPRESGSGNPGATNVLRIGGKGAAVAVLIFDILKGMLPVWGAYALGVTPFWLGLIAIAACLGHIWPVFFGFKGGKGVATAFGAIAPIGWDLTGVMAGTWLLTVLLSGYSSLGAIVSALIAPFYVWWFKPQFTFPVSMLSCLILLRHHDNIQRLWRRQETKIWTKLKKKRQKD

SEQ ID NO: 74987 - protein, 71 aa, Salmonella typhimurium; identical to SEQ ID NO: 43063

SEQ ID NO: 74988 - protein, 581 aa, Salmonella typhimurium
MAGRIPRVFINDLLARTDIVDLIDVRVKLKKQGKNYHACCPFHNEKTPSFTVNGEKQFYHCFGCGAHGNAIDFLMNYDKLEFVETVEELAAMHNLEIPYEAGTGLSQIERHQRQNLYQLMNGLNDFYQQSLTHPAAKPARDYLQKRGLSAEIIQRFAIGFAPPGWDNALKRFGNNSDNKALLLDAGMLVNNEQGSTYDRFRNRVMFPIRDKRGRVIGFGGRVLGNDTPKYLNSPETDIFHKGRQLYGLYEAQQYSAEPQRLLVVEGYMDVVALAQYDINYAVASLGTSTTADHMHMLFRATNNVICCYDGDRAGRDAAWRALETAMPYMTDGRQVRFMFLPDGEDPDTLVRKEGKAAFEARMEQAQPLSTFLFNSLLPQVDLSSPDGSTQLAALALPLINQVPGDAHRIQLRQTLGLKLGIFDDSQLDRLVPKQAESGVSRPAPQLKRTTMRILIGLLVQNPDLAPLVPPLDALDQNKLPGLGLFKELVKTCLAQPGLTTGQLLELYRGTNDAATLEKLSMWDDIADKAIAEKTFTDSLNHMFDSLLQLRQEELIARDRTHGLSSEERRELWTLNQELARK

SEQ ID NO: 74989 - protein, 660 aa, Salmonella typhimurium
MPHIDREAPDSRSERQRPKYKYALALNVDSYTVDTNQTNKCGYRLMEQNPQSQLKLLVTRGKEQGYLTYAEVNDHLPEDIVDSDQIEDIIQMINDMGIQVMEEAPDADDLLLAENTTSTDEDAEEAAAQVLSSVESEIGRTTDPVRMYMREMGTVELLTREGEIDIAKRIEDGINQVQCSVAEYPEAITYLLEQYDRVEAEEARLSDLITGFVDPNAEEEMAPTATHVGSELSQEDLDDDEDEDEEDGDDDAADDDNSIDPELAREKFAELRAQYVVTRDTIKAKGRSHAAAQEEILKLSEVFKQFRLVPKQFDYLVNSMRVMMDRVRTQERLIMKLCVEQCKMPKKNFITLFTGNETSETWFNAAIAMNKPWSEKLHDVAEEVQRCLQKLRQIEEETGLTIEQVKDINRRMSIGEAKARRAKKEMVEANLRLVISIAKKYTNRGLQFLDLIQEGNIGLMKAVDKFEYRRGYKFSTYATWWIRQAITRSIADQARTIRIPVHMIETINKLNRISRQMLQEMGREPTPEELAERMLMPEDKIRKVLKIAKEPISMETPIGDDEDSHLGDFIEDTTLELPLDSATTESLRAATHDVLAGLTAREAKVLRMRFGIDMNTDHTLEEVGKQFDVTRERIRQIEAKALRKLRHPSRSEVLRSFLDD

SEQ ID NO: 74990 - protein, 289 aa, Salmonella typhimurium
MSTFKLLKTLTSRRQVLKTGLAALTLSGMSHAVAKEETLKTSNGHSKPKTKKTGSKRLVMLDPGHGGIDTGAIGRNGSQEKHVVLAIAKNVRAILRNHGIDARLTRTGDTFIPLYDRVEIAHKHGADLFMSIHADGFTNPKAAGASVFALSNRGASSAMAKYLSERENRADEVAGKKATDRDHLLQQVLFDLVQTDTIKNSLTLGSHILKKIKPIHKLHSRTTEQAAFVVLKSPSIPSVLVETSFITNPEEERLLGTTAFRQKIATAIANGIISYFHWFDNQKAHTKKR

SEQ ID NO: 74991 - protein, 268 aa, Salmonella typhimurium
MVETLLEVRNLSKTFRYRTGWFRRQTVDAVKPLSFTLRERQTLAIIGENGSGKSTLAKMLAGMIEPTSGELLIDDHPLHYGDYSFRSQRIRMIFQDPSTSLNPRQRISQILDFPLRLNTDLEPEQRRKQIVETMRMVGLLPDHVSYYPHMLAPGQKQRLGLARALILRPKVIIADEALASLDMSMRSQLINLMLELQEKQGISYIYVTQHIGMMKHISDQVLVMHQGEVVERGSTADVLASPLHELTRRLIAGHFGEALTADAWRKDR

SEQ ID NO: 74992 - protein, 429 aa, Salmonella typhimurium
MKALNREVIDYFKEHVNPGFLEYRKSVTAGGDYGAVEWQAGSLNTLVDTQGQEFIDCLGGFGIFNVGHRNPVVVSAVQNQLAKQPLHSQELLDPLRAMLAKTLAALTPGKLKYSFFCNSGTESVEAALKLAKAYQSPRGKFTFIATSGAFHGKSLGALSATAKSTFRRPFMPLLPGFRHVPFGNIDAMSMAFSEGKKTGDEIAAVILEPIQGEGGVILPPQGYLTEVRKLCDEFGALMILDEVQTGMGRTGKMFACEHENVQPDILCLAKALGGGVMPIGATIATEEVFSVLFDNPFLHTTTFGGNPLACAAALATINVLLEQNLPAQAEQKGDTLLDGFRQLAREYPNLVHDARGKGMLMAIEFVDNETGYRFASEMFRQRVLVAGTLNNAKTIRIEPPLTLTIELCEQVLKSARNALAAMQVSVEEV

SEQ ID NO: 74993 - protein, 262 aa, Salmonella typhimurium
MGFLSGKRILVTGVASKLSIAYGIAQAMHREGAELAFTYQNDKLKGRVEEFAAQLGSSIVLPCDVAEDASIDAMFAELGNVWPKFDGFVHSIGFAPGDQLDGDYVNAVTREGFKVAHDISSYSFVAMAKACRTMLNPGSALLTLSYLGAERAIPNYNVMGLAKASLEANVRYMANAMGPEGVRVNAISAGPIRTLAASGIKDFRKMLAHCEAVTPIRRTVTIEDVGNSAAFLCSDLSAGISGEVVHVDGGFSIAAMNELELK

SEQ ID NO: 74994 - protein, 326 aa, Salmonella typhimurium
MEQCRKAGKSHWYHETQSTMSSQTPLSLMPEAAYVNDRFLLDLTVAETALTPFESWLKPARQLADVLFPRTVLNDRLHTFSAYERMSTALTAAQVFGVQRLCRYYAARLAPLPGPDASRESNQRLAQITQYARQLAGSPSVINTRAREQLAEVGLTARDTVLINQIIGFIGFQARVAAIFQAFCRLPVRELPGQEMQRFARAARFQNPQTIWRPAASLVEYPPAHTKVRRQYSSSQCQMMAPVLMRDPSSFALLERILTSTLHTASPPSLLPLITLLTSRINGSAACFNEQATQPGAWRRAVITLRQEDDDIARWELEPALTQAIQ

SEQ ID NO: 74995 - protein, 644 aa, Salmonella typhimurium
MFQDNPLLAQLKQQLHSQTPRAEGVVKATEKGFGFLEVDAQKSYFIPPPQMKKVMHGDRIVAVIHTEKERESAEPEELIEPFLTRFVGKVQGKNDRLSIVPDHPLLKDAIPCRAARGVQHEFKEGDWAVAEMRRHPLKGDRSFYADLTQYITFADDHFVPWWVTLARHNLEKEAPNGVATEMLDEGLERQDLTALNFVTIDSASTEDMDDALYAEELADGRLQLTVAIADPTAWIAEGSKLDNTAKIRAFTNYLPGFNIPMLPRELSDDLCSLRANEVRPALACRMIIAADGTIDDDIAFFAATIESKAKLAYDNVSDWLENNGTWQPDNEGIAQQIRLLHRICLSRSEWRHHHALVFKDRPDYRFVLGEKGEVLDIVAEPRRIANRIVEESMIAANLCAARVLRDKLGFGIYNVHTGFDPANADALAALLKTHGLHVDAEEVLTLEGFCKLRRELDAQPSGFLDSRIRRFQSFAEISTEPGPHFGLGLEAYATWTSPIRKYGDMINHRLLKAVIKGEAIARPQEDITQQMAERRRLNRMAERDVGDWLYARFLNDKAGTNTRFAAEIIDVSRGGMRVRLVDNGAIAFIPAPFLHAVRDELVCSQENGTVQIKGETVYKVTDVIDVTIAEVRMETRSIIARPAA

SEQ ID NO: 74996 - protein, 660 aa, Salmonella typhimurium
MMKQIQEQTALNPLHSHWRLADDRNVLYLSPTGETDAEKTVELSPEQAGRIREITAITSSLLITLLIEKQVTAVHLVGRKINNREWAGSLATWPDTPAVSPTQAQELSFAEQIVSEANSVIAILDSRGKICRFNRLCEEYTGLKERDVIGQSVFKLFMSRREAVASRHYIENFFRNGNAYEIERWIKTRKGQRLFLFRNKFVHNGSGKNEIFLICAGTDITEERRAQERLRILANTDTVTGLPNRNAIHEFINHAIASAGESQVGIVYLDLDNFKKINDAYGHMFGDQLLQAVSLALLSCLEEDQLLARLGGDEFIVLAAHTSQAALEAVASRILTRLRQPFRIGLIEVYTGCAIGISLAPRHGQDSESLIRTADTAMYNAKEGGRGQFCVFSPEMNQRVFDYHWLDTNLRKALENDQLLIHYQPKITWRGEVRSLEALVRWQSPERGLIPPLEFISYAEESGLIVPLGRWVILDVVRQIAKWRDKGINLRVAVNFSARQLADQTLFTALKQALYDLNFEYCPIDVELTESCLIENDTLALSVIQQFSQLGAQIHLDDFGTGYSSLSQLARFPIDAVKLDQAFVRDIHKQPLSQSLVRAIVAVAQALNLQVIAEGVENAKEDAFLTKNGVNERQGFLFAKPMPAVSFERWYKRYQTKKMR

SEQ ID NO: 74997 - protein, 332 aa, Salmonella typhimurium
MIRFAVIGTNWITRQFVDAAHETGKFRLAAVYSRSLEQAQSFANDYPVEHLFTSLEAMAQSDAIEAVYIASPNSLHFSQTQRFLQHKKHVMCEKPLASNLAEVDAAIACARDNQRVLFEAFKTACLPNFLLLRESLPKIGRMHKALLNYCQYSSRYQRYLNGENPNTFNPAFSNGSIMDIGYYCLASAIALWGEPRSVQASANLLESGVDAHGVVVMDYGDFSVTLQHSKVSDSVLASEIQGERGSLVIEKLSECQKVCFAPRGALMQDLTQPQHINTMLYEAGAFAQLIENHAVEHPGLSLSRATAKWLTEIRRQTGVIFPADDLTHPLTA

SEQ ID NO: 74998 - protein, 322 aa, Salmonella typhimurium
MNTVGTPLLWGGFAVVVVIMLSIDLLLQGRRGAHAMSMKQAAGWSILWVTLSLLFNAAFWWYLAETQGREVADPQALAFLTGYLIEKSLAVDNVFVWLMLFSYFSVPPALQRRVLVYGVLGAIVLRTIMIFAGTWLITQFEWLLYVFGAFLLFTGVKMALAKEDESGIGEKPMVRWLRGHLRMTDTIENEHFFVRKNGLLYATPLLLVLIMVEFSDVIFAVDSIPAIFAVTTDPFIVLTSNLFAILGLRAMYFLLSGVAERFSMLKYGLAVILVFIGIKMLIVDFYHIPIAISLGVVFGILTITLVINAWVNHQRDKKLRAQ

SEQ ID NO: 74999 - protein, 127 aa, Salmonella typhimurium; identical to SEQ ID NO: 73044

SEQ ID NO: 75000 - protein, 122 aa, Salmonella typhimurium; identical to SEQ ID NO: 73045

SEQ ID NO: 75001 - protein, 101 aa, Salmonella typhimurium
MSKDNTTEHLRAELKSLTDTLEEVLSSSGEKSKEELSKIRSKAERALKESRYRLGETGDVIAKQTRVAAARADDYVRENPWTGVGIGAAVGLVLGVLLTRR

SEQ ID NO: 75002 - protein, 196 aa, Salmonella typhimurium
MQLKRVAEAKLPTPLGDFLMVGFEELATGHDHAALVFGDISGKTPVLARVHSECLTGDALFSLRCDCGFQLEAALTHIAEEGRGILIYHRQEGRNIGLLNKIRAYALQDQGYDTVEANHQLGFAADERDFTLCADMFKLLGVDEVRLLTNNPKKVEILTEAGINIVERVPLIVGRNPNNEHYLDTKAAKMGHLLSK

SEQ ID NO: 75003 - protein, 132 aa, Salmonella typhimurium
MADSRQAQGPGKSVLGIGQRIVTIIVEMVETRLRLAVVELEEEKANLFQLLLMVGLTMLFAAFGLMSLMVLVIWAIDPQYRLNAMIATTVVLLVLALIGGIWTLRKARQSTLLRHTRHELANDRQILEDDQS

SEQ ID NO: 75004 - protein, 328 aa, Salmonella typhimurium
MGQLIDGVWHDTWYDTKSSGGKFQRSASAFRNWLTADGAPGPSGEGGFAAEKDRYHLYVSLACPWAHRTLIFRKLKGLEPFIPVSVVNPLMLENGWTFDDTFPAATGDTLYQHEFLYQLYLHADPHYSGRVTVPVLWDKKNHTIVSNESAEIIRMFNSAFDGLGAKAGDYYPPALQSKIDELNGWIYDNVNNGVYKAGFATSQQAYDEAVDKVFTALARLEQILGQHRYLTGDQLTEADIRLWTTLVRFDPVYVTHFKCDKYRISDYLNLYGFLRDIYQISGIAETVNMDHIRHHYFRSHKTINPTGIISVGPWQDLLEPHGRDVRFG

SEQ ID NO: 75005 - protein, 316 aa, Salmonella typhimurium
MNQLDGIKQFTTVVADSGDIESIRHYQPQDATTNPSLLLKAAGLEQYGHLIEDAIAWGKKHGGTQEQQVAAASDKLAVNFGAEILKSIPGRVSTEVDARLSFDKEKSIEKARHLVDLYQQQGVDKSRILIKLAATWEGIRAAGQLEKEGINCNLTLLFSFAQARACAEAGVYLISPFVGRIYDWYQARSPLEPYVVEEDPGVKSVRNIYDYFKQHRYETIVMGASFRRTEQILALTGCDRLTISPNLLKELKEKEEPVIRKLVPSSQMFHRPTPMTEAEFRWEHNQDAMAVEKLSEGIRLFAVDQRKLEDLLAAKL

SEQ ID NO: 75006 - protein, 666 aa, Salmonella typhimurium
MSRKDLANAIRALSMDAVQKANSGHPGAPMGMADIAEVLWNDFLKHNPTDPTWYDRDRFILSNGHASMLLYSLLHLTGYDLPLEELKNFRQLHSKTPGHPEIGYTPGVETTTGPLGQGLANAVGLAIAERTLGAQFNRPDHEIVDHYTYVFMGDGCLMEGISHEVCSLAGTLGLGKLIGFYDHNGISIDGETEGWFTDDTAKRFEAYHWHVVHDIDGHDPEAVKKAILEAQSVKDKPSLIICRTVIGFGSPNKAGKEESHGAALGEEEVALTRQKLGWHHPAFEIPKEIYRAWDGREKGEKAQQQWQEKFAAYEKAYPELAAEFTRRMSGGLPEAWESATQKFINDLQANPAKIATRKASQNTLNAYGPLLPELLGGSADLAPSNLTIWKGSTSLKEDPAGNYIHYGVREFGMTAIANGIAHHGGFVPYTATFLMFVEYARNAARMAALMKARQIMVYTHDSIGLGEDGPTHQAVEQLASLRLTPNFSTWRPCDQVEAAVGWKLAIERQHGPTALILSRQNLAQVERTPEQVKAIARGGYILKDSGGKPDIILIATGSEMEITLQAAEKLTGEGHNVRVVSLPSTDIFDAQDEAYRESVLPAHVTARVAVEAGIADYWYKYVGLKGAIIGMTGYGESAPADKLFPYFGFTVENIVEKARRVLNIKG

SEQ ID NO: 75007 - protein, 431 aa, Salmonella typhimurium
SRECQERRNAQQTGNNNQVQRSAFIFVQCGNLVDQPCRNTAHHTEDRATNRGEAQYRRVEHNGAPGQQNSENHNAALYQIFLNLLGGHFTAQDIHHNALRRFAESINAKEGGHDGKDVQNYANHFDPASAIAANKLRGDRQGGNILLVGFHRFVMPHRQGEGNRIEKYGNEQDAKRNIHGTQRFMACDLNRFFATVRDHHWARLDKNRGQRKWQGNNGVFNQQGHRRQRANVIQMPHTHHRDAQRRHYQLGQHHASGDFEQFFTAGNRHQDADQHQTIKWTIGKQSFRYAESMQIRGAVVSNRRRIDEHPDDEHHKVQRANTPVFAQIAADHAGVVFTFRGFRQRINKQPLEQVHGRIANNRREKDPKSHQANLDRKKNDPCANRHPDTHNDPTGVGTIKFDGFTPFAFSHPCPTRRGCVEDYAGITCRFH

SEQ ID NO: 75008 - protein, 253 aa, Salmonella typhimurium
MHYQPKQDLLQNRIILVTGASDGIGREAALTYARYGATVILLGRNEEKLRRVAQHIADEQHVQPQWFTLDLLTCTAEECRQVADRIAAHYPRLDGVLHNAGLLGEIGPMSEQDPQIWQDVMQVNVNATFMLTQALLPLLLKSDAGSLVFTSSSVGRQGRANWGAYATSKFATEGMMQVLADEYQNRSLRVNCINPGGTRTSMRASAFPTEDPQKLKTPADIMPLYLWLMGDDSRRKTGMTFDAQPGRKPGIAQ

SEQ ID NO: 75009 - protein, 566 aa, Salmonella typhimurium
VTVKRPVSASLAKAFFYIVLLSILSTGSALLTLTSSLRDAEAINIAGSLRMQSYRLGYDLQSRSPQINAHRQLFQHALNSPVLQNLNAWYVPQAVKTRYERLHANWLEMNSRLQDGDIAWYQTNINNYVNQIDLFVLALQHYAERKVMLVVAISLAGGIGIFTLVFFTLRRIRQQVVRPLNQLVTASQRIEHGQFAPLPLDTSLPNELGLLAKTFSQMSSELHKLYRSLEASVEEKTHDLHEAHRRLEVLYQCSQALNTSQIDVHCFRHILQIVREHDAAWYLELTVGDNWRISEGTQSPDLPMQMLPVTMQDTVYGELHWQSPNVNASTPLLNSVSTMLGRGLYFNQAQKHFQQLLLMEERATIARELHDSLAQVLSYLRIQLTLLKRAIPEDNAGAQSIMADFSRALNDAYRQLRELLTTFRLTLQQADLPSALHEMLEDLQSQTPAKLTLDCRLPTLALDAQMQVHLLQIVREAVLNAIKHANASEIAVSCVTAPDGDHTVYIRDNGIGIGEPHEPAGHYGLNIMRERAERLGGTLNFSQPSGGGTLVSISFRSSNKEESQLT

SEQ ID NO: 75010 - protein, 531 aa, Salmonella typhimurium
MADILLLDNIDSFTWNLADQLRTNGHNVVIYRNHIPAQTLIDRLATMKNPVLMLSPGPGVPSEAGCMPELLTRLRGKLPIIGICLGHQAIVEAYGGYVGQAGEILHGKASSIEHDGQAMFAGLANPLPVARYHSLVGSNVPAGLTINAHFNGMVMAVRHDADRVCGFQFHPESILTTQGARLLEQTLAWAQQKLEPTNTLQPILEKLYQAQTLTQQESHQLFSAVVRGELKPEQLAAALVSMKIRGEHPNEIAGAATALLENAAPFPRPEYLFADIVGTGGDGSNSINISTASAFVAAACGLKVAKHGNRSVSSKSGSSDLLAAFGINLDMNADKSRQALDELGVCFLFAPKYHTGLRHAMPVRQQLKTRTLFNVLGPLINPAHPPLALIGVYSPELVLPIAETLRVLGYQRAAVVHSGGMDEVSLHAPTIVAELHDGEIKSYQLTAEDFGLTPYHQDQLAGGTPEENRDILTRLLQGKGDAAHEAAVAANVAMLMRLHGQEDLKANAQTVLDVLRNGTAYDRVTALAARG

SEQ ID NO: 75011 - protein, 452 aa, Salmonella typhimurium
MQTVLAKIVADKAIWVEARKQQQPLASFQNEIQPSTRHFYDALQGARTAFILECKKASPSKGVIRDDFDPARIASIYQHYASAISVLTDEKYFQGSFDFLPVVSQSAPQPILCKDFIIDPYQIYLARYYQADACLLMLSVLDDEQYRQLSAVAHSLKMGVLTEVSNDEERERAIALGAKVVGINNRDLRDLSIDLNRTRQLAPKLGHGVTVISESGINTYGQVRELSHFANGFLIGSALMAHDDLNAAVRRVLLGENKVCGLTRAQDAKAACDAGAIYGGLIFVPSSPRAVSVEQAREVISGAPLQYVGVFKNADIADVCQKAAVLSLSAVQLHGSEDQAYVNALREALPKQVQIWKALSVSDALPARDYHHVDKYIFDNGQGGSGQRFDWSLLQGQPLDNVLLAGGLAADNCVQAAQVGCAGLDFNSGVESQPGIKDARLLASVFQTLRAY

SEQ ID NO: 75012 - protein, 397 aa, Salmonella typhimurium
MTTLLNPYFGEFGGMYVPQILMPALNQLEEAFVSAQKDPEFQAQFADLLKNYAGRPTALTKCQNITAGTRTTLYLKREDLLHGGAHKTNQVLGQALLAKRMGKSEIIAETGAGQHGVASALASALLGLKCRIYMGAKDVERQSPNVFRMRLMGAEVIPVHSGSATLKDACNEALRDWSGSYETAHYMLGTAAGPHPYPTIVREFQRMIGEETKAQILDKEGRLPDAVIACVGGGSNAIGMFADFINDTSVGLIGVEPGGHGIETGEHGAPLKHGRVGIYFGMKAPMMQTADGQIEESYSISAGLDFPSVGPQHAYLNSIGRADYVSITDDEALEAFKTLCRHEGIIPALESSHALAHALKMMREQPEKEQLLVVNLSGRGDKDIFTVHDILKARGEI

SEQ ID NO: 75013 - protein, 284 aa, Salmonella typhimurium
MFIISSKNMLQKAQHAGYAVPAFNIHNLETLQVVVETAAEMRSPLIVAGTPGTFSYAGMGNIVAIAGDLAREYNLPLAIHLDHHESLADIESKVMAGIRSVMIDGSHFPFEENVALVKSVVDFCHRYDTSVEAELGRLGGIEDDLVVDSKDALYTNPQQAREFVARTGIDSLAVAIGTAHGMYAAEPKLDFERLAEIRALVDIPLVLHGASGLPESDIRQAISLGVCKVNVATELKIAFSDALKEYFLQNPKANDPRHYMQPAKQAMKEVVRKVIHVCGCEGQL

SEQ ID NO: 75014 - protein, 304 aa, Salmonella typhimurium
VIYTLTLNSAIDMNIFSDPLQPNIVNRTHHTEFCPNGKGVNVALVLDHFQIPAHILGIFGGFTGHYIVESLRTRKMPVTPAWVEEPTRINIFIHDGKQEYKLVNPGSYIPDECKQQIITIISQLPDADYLVISGSLPQGIESRFYAEIMHICQQKNIGVILDISHPSLRQLLEFKPLLIKPNDEEVKAIFGLTVSDDNDAKNTLTTLHALGAQNVLLTLGAKGMYFSNGIDYWFCSAPTVDLVSSACAGDAALAAFLSQWLSTGEVEYALSLASATGADVASSAGLGQLAAIETLLSQIHVRKL

SEQ ID NO: 75015 - protein, 475 aa, Salmonella typhimurium
MKKIIAVTGCPTGIAHTFMAEEALKNAAKKLSVEIKVETNGASGVENAIQPADLVDIAGVIIAADKDVLPDRFNGLPVIEVPVKEAIHHPAELINKVINGEAPIRKGESTTSTEIIEKESLGRQIYKHLMSGVSNMLPFVVAGGILIAVSFLWGIYSADPNSAEYNATAAMLMKIGQQAFSIMVPVFTAYIAFSISGRPGMVAGFVGGLLANATGAGFLGGIIAGFAAGYLMLWVKNRLEGLPRQYEGLKSIFIMPLIGVLVIGVLMSLLGQPVAAINNSMMNWLASLQEANPILLGIVVGAMCSFDFGGPVNKAAYVTGTLLLGQGNFYFMAGVSAACITPPLVIALATTFFPKGFSEEERAAGMVNYILGCTHITEGAIPFAAKDPLRVIPMMMIASSISAVLSYSLRIQVPAPHGGFLILPLVSQPLAWVLCILAGSACGAVMLGLWRLWAVRKNSVNTTPVAKAGGQNAAL

SEQ ID NO: 75016 - protein, 179 aa, Salmonella typhimurium
MKQFLDFLPLVVFFAFYKLYDIYAATSALIVATAIVLIYSWVRYRKIEKMALITFVLVAVFGGLTLFFHNDEFIKWKVTVIYALFAGALLISQWVMKKPLIQRMLGKELALPQQVWSKLNLAWALFFIACGLANIYIAFWLPQNIWVNFKVFGLTALTLIFTLLSGVYIYRHLPQEDKS

SEQ ID NO: 75017 - protein, 133 aa, Salmonella typhimurium
MTTMDNTPQGELVLRTLAMPADTNANGDIFGGWLMSQMDIGGAILAKEIAHGRVVTVRVEGMTFLRPVAVGDVVCCYARCVKRGTTSISINIEVWVKKVASEPIGQRYKATEALFIYVAVDPDGKPRPLPVQG

SEQ ID NO: 75018 - protein, 294 aa, Salmonella typhimurium
LTIFRVEGITQAIANKVKTERHHEKASRKQQQPRDFHICAIAQRSPTARFLRPKPQETEERLKQNHAGHQQRCIHYHYAQDVRHNMADHNAGSRHTTHLRGFDEFFTFKTGLATHDTRHIKPGDHADGDENQQNVLPKKRHQQNHKEHKRERVEDLQQTHHHRINFAAQIAGQRAIQRSDNDRHQRGGNPDHDTPADGNAHQQIAPGRVSAEIVTGRHIRRTGHHAPVGIEIGKLRQHRRHCHEQGYQKQDNKTGHRRTVMHKAPTGILPKAATFHLQLFTEIFQRLAVFLTHH

SEQ ID NO: 75019 - protein, 449 aa, Salmonella typhimurium
MLSSQTSSIFTVSRLNQTVRLLLEQEMGQVWISGEISNFTQPASGHWYFTLKDDTAQVRCAMFRNSNRRVTFRPQHGQQVLVRANITLYEPRGDYQIIAESMQPAGEGLLQQKYEQLKAKLQAEGLFDQQHKQPLPSPAHCVGVITSKTGAALHDILHVLKRRDPSLPVIIYPTAVQGDDAPGQIVRAIELANARGECDVLIVGRGGGSLEDLWSFNDERVARAIFASRIPVVSAVGHETDVTIADFVADLRAPTPSAAAEIVSRNQQELLRQIQSAQQRLGMAMDYYLANRSRRFTQIFHRLQQQHPQLRLARQQTALERLRQRMGFALEARIKQANQRQQCVSQRLSQQNPQPRIHRAQSRIQQLEYRLTENIRSRLSEQRERFGNAVTHLEAVSPLATLARGYTVSTTTDGKVLKKIKQVKAGDIMTTRLEDGWLESEVKSVTPGT

SEQ ID NO: 75020 - protein, 892 aa, Salmonella typhimurium
MAVTNVAELNALVERVKKAQREYASFTQEQVDKIFRAAALAAADARIPLAKMAVAESGMGIVEDKVIKNHFASEYIYNAYKDEKTCGVLSEDDTFGTITIAEPIGIICGIVPTTNPTSTAIFKSLISLKTRNAIIFSPHPRAKEATNKAADIVLQAAIAAGAPKDLIGWIDQPSVELSNALMHHPDINLILATGGPGMVKAAYSSGKPAIGVGAGNTPVVIDETADIKRAVASVLMSKTFDNGVICASEQSVVVVDSVYDAVRERFASHGGYMLQGQELKAVQNVILKNGALNAAIVGQPAYKIAELAGFSVPETTKILIGEVTVVDESEPFAHEKLSPTLAMYRAKDFEEAVEKAEKLVAMGGIGHTSCLYTDQDNQPERVAYFGQMMKTARILINTPASQGGIGDLYNFKLAPSLTLGCGSWGGNSISENVGPKHLINKKTVAKRAENMLWHKLPKSIYFRRGSLPIALDEVITDGHKRALIVTDRFLFNNGYADQITSVLKAAGVETEVFFEVEADPTLSVVRKGAELANSFKPDVIIALGGGSPMDAAKIMWVMYEHPETHFEELALRFMDIRKRIYKFPKMGVKAKMIAVTTTSGTGSEVTPFAVVTDDATGQKYPLADYALTPDMAIVDANLVMDMPKSLCAFGGLDAVTHALEAYVSVLASEFSDGQALQALKLLKENLPASYHEGSKNPVARERVHSAATIAGIAFANAFLGVCHSMAHKLGSQFHIPHGLANALLICNVIRYNANDNPTKQTAFSQYDRPQARRRYAEIADHLGLSAPGDRTAAKIEKLLAWLESIKAELGIPKSIREAGVQEADFLAHVDKLSEDAFDDQCTGANPRYPLISELKQILLDTYYGRDFTEGEVAAKKDVVAAPKAEKKAKKSA

SEQ ID NO: 75021 - protein, 152 aa, Salmonella typhimurium
VSQPCPCGSADEYSLCCGRIVSGERVAPDPSHLMRSRYCAFVMKDADYLIKSWHPTCNAAAFRDDIIAGFANTRWLGLTIFEHTWSEAENTGYVSFIARFSEQGKNGAIIERSRFIKENGQWYYIDGTRPQLGRNDPCPCGSGKKFKKCCGQ

SEQ ID NO: 75022 - protein, 280 aa, Salmonella typhimurium
MQSLQRKVLRTICPDQKGLIARITNICYKHELNIVQNNEFVDHRTGRFFMRTELEGIFNDSTLLADLDSALPEGSVRELNPAGRRRVVILVTKEAHCLGDLLMKANYGGLDVEIAAVIGNHETLRSLVERFEIPFELVSHEGLTREEHDTKMADAIDAHQPDYVVLAKYMRVLTPGFVARFPNKIINIHHSFLPAFIGARPYHQAYERGVKIIGATAHYVNDNLDEGPIIMQDVIHVDHTYTAEDMMRAGRDVEKNVLSRALYQVLAQRVFVYGNRTIIL

SEQ ID NO: 75023 - protein, 315 aa, Salmonella typhimurium
VPDMKLFAGNATPELAQRIANRLYTSLGDAAVGRFSDGEVSVQINENVRGGDIFIIQSTCAPTNDNLMELVVMVDALRRASAGRITAVIPYFGYARQDRRVRSARVPITAKVVADFLSSVGVDRVLTVDLHAEQIQGFFDVPVDNVFGSPILLEDMLQLNLDNPIVVSPDIGGVVRARAIAKLLNDTDMAIIDKRRPRANVSQVMHIIGDVAGRDCVLVDDMIDTGGTLCKAAEALKERGAKRVFAYATHPIFSGNAANNLRNSVIDEVVVCDTIPLTDEIKALPNVRTLTLSGMLAEAIRRISNEESISAMFEH

SEQ ID NO: 75024 - protein, 553 aa, Salmonella typhimurium
VMPFRALIDACWKEKYTASRFTRDVIAGITVGIIAIPLAMALAIGSGVAPQYGLYTSAVAGIVIALTGGSRFSVSGPTAAFVVILYPVSQQFGLAGLLVATLMSGFFLILFGLARLGRLIEYIPVSVTLGFTSGIGITIGTMQIKDFLGLQMAHVPEHYLQKVGALFMALPTVNIGDAAIGVVTLGTLIFWPRLGIRLPGHLPALLAGCAVMGIVNLLGGNVATIGSQFHYVLADGTQGNGIPQLLPQLMLPWSLPGSDFTLSWDSLRALLPAAFSMAMLGAIESLLCAVVLDGMTGTKHKANSELIGQGLGNMVAPFFGGITATAAIARSAANVRAGATSPISAVIHAILVILALLVLAPLLSWLPLSAMAALLLMVAWNMSEAHKVVDLLRHAPKDDIIVMLLCMSLTVLFDMVIAISVGIVLASLLFMRRIARMTRLAPVNVDVPDDVLVLRVIGPLFFAAAEGLFTDLESRIKGKRIVVLKWDAVPVLDAGGLDAFQRFVKRLPEGCELRISNLEFQPLRTMARAGIKPIPGRLTFFPNRTEALADLLS

SEQ ID NO: 75025 - protein, 363 aa, Salmonella typhimurium
MGFKCGIVGLPNVGKSTLFNALTKAGIEAANFPFCTIEPNTGVVPMPDPRLDQLAEIVKPQRILPTTMEFVDIAGLVKGASKGEGLGNQFLTNIRETEAIGHVVRCFENDNIIHVAGKVNPAEDIDVINTELALADLDTCERAIHRVQKKAKGGDKDAKAELAALEKCLPHLAEAGMLRSLDLTDEDKAAIRYLSFLTLKPTMYIANVNEDGFENNPYLDQVREIAAKEGSVVVPVCAAVEADIAELDDDERDEFMAELGLEEPGLNRVIRAGYRLLNLQTYFTAGVKEVRAWTIPVGATAPQAAGKIHTDFEKGFIRAQTIAFDDFITYKGEQGAKEAGKMRAEGKDYIVKDGDIMNFLFNV

SEQ ID NO: 75026 - protein, 328 aa, Salmonella typhimurium
MNDNAFTFQTLHPETIMDALFEQGIMVDSGLTPLNSYENRVYQFQDEDRRRFVVKFYRPERWSVDQIREEHQFALELVKDEVPVAAPLAFNGQTLLAHQGYHYAIFPSVGGRQFEADNIDQMEAVGRYLGRLHQTGRKRPFTFRPDIGLAEYLFEPRQVFEDAALIPSGQKAAFLKATDTLLSAVTECWRTDFATLRLHGDCHAGNILWRDGPLFVDLDDARNGPAIQDLWMLLNGDKAEQRMQLETIIEAYEEVSEFDTAEIGLIEPLRAMRLVYYLAWLIRRWGDPAFPKNFPWLTGEDYWQRQTTTFIEQTKILHEPPLQLTPMY

SEQ ID NO: 75027 - protein, 928 aa, Salmonella typhimurium
MVQIPENPLILVDGSSYLYRAYHAFPPLTNSAGEPTGAMYGVLNMLRSLIMQYQPTHAAVVFDAKGKTFRDELFEHYKSHRPPMPDDLRAQIEPLHAMVKAMGLPLLAVSGVEADDVIGTLAREAEKVGRPVLISTGDKDMAQLVTPNITLINTMTNTILGPDEVVNKYGVPPELIIDFLALMGDSSDNIPGVPGVGEKTAQALLQGLGGLDTLYAEPEKIAGLTFRGAKTMAGKLAQNKDVAYLSYKLATIKTDVELELTCEQLEVQQPIADELLGLFKKYEFKRWTADVESGKWLQAKGAKPAAKPQETVVIDESPSEPAAALSYENYVTILDDVTLESWIEKLKKAPVFAFDTETDSLDNIAANLVGLSFAIEPGVAAYVPVAHDYLDAPDQISRQRALELLKPLLEDEKVRKVGQNLKYDRGVLQNYGIELRGIAFDTMLESYILNSVAGRHDMDSLSDRWLKHKTITFEDIAGKGKNQLTFNQIALEEAGRYAAEDADVTLQLHLKMWPELQQHKGPLNVFENIEMPLVPVLSRVERNGVKIDPAVLHKHSEEITLRLAELEKKAHDIAGEAFNLSSTKQLQTILFEKQGIKPLKKTPGGAPSTSEEVLEELALDYPLPKVILEYRGLAKLKSTYTDKLPLMINPKTGRVHTSYHQAVTATGRLSSTDPNLQNIPVRNEEGRRIRQAFIAPEDYLIVSADYSQIELRIMAHLSRDKGLLTAFAEGKDIHRATAAEVFGLPLDSVTGEQRRSAKAINFGLIYGMSAFGLSRQLNIPRKEAQKYMDLYFERYPGVLEYMERTRAQAKEQGYVETLEGRRLYLPDIKSSNAARRAGAERAAINAPMQGTAADIIKRAMIAVDAWLQAEQPRVRMIMQVHDELVFEVHKDDLDAVAKRIHQLMENCTRIDVPLLVEVGSGENWDQAH

SEQ ID NO: 75028 - protein, 607 aa, Salmonella typhimurium
VIENLRNIAIIAHVDHGKTTLVDKLLQQSGTFDARAETQERVMDSNDLEKERGITILAKNTAIKWNDYRINIVDTPGHADFGGEVERVMSMVDSVLLVVDAFDGPMPQTRFVTKKAFAHGLKPIVVINKVDRPGARPDWVVDQVFDLFVNLDATDEQLDFPIIYASALNGIAGLDHEDMAEDMTPLYQAIVDHVPAPDVDLDGPLQMQISQLDYNNYVGVIGIGRIKRGKVKPNQQVTIIDSEGKTRNAKVGKVLTHLGLERIDSNIAEAGDIIAITGLGELNISDTICDPQNVEALPALSVDEPTVSMFFCVNTSPFCGKEGKFVTSRQILDRLNKELVHNVALRVEETEDADAFRVSGRGELHLSVLIENMRREGFELAVSRPKVIFREIDGRKQEPYENVTLDVEEQHQGSVMQALGERKGDLKNMNPDGKGRVRLDYVIPSRGLIGFRSEFMTMTSGTGLLYSTFSHYDDIRPGEVGQRQNGVLISNGQGKAVAFALFGLQDRGKLFLGHGAEVYEGQIIGIHSRSNDLTVNCLTGKKLTNMRASGTDEAVILVPPIKMSLEQALEFIDDDELVEVTPTSIRIRKRHLTENDRRRANRGQKEE

SEQ ID NO: 75029 - protein, 391 aa, Salmonella typhimurium
MTNQPTEIAIVGGGMVGGALALGLAQQGFTVMVIEHAAPAPFVADSQPDVRISAISAASVALLKGLGVWEAVQGMRSHPYRRLETWEWENAHVVFDAAELKLPLLGYMVENNVLQQALWQALEAHPGVTLRVPASLAALQRRHDGYALELADGECITPKLVIGADGANSQVRQMAGIGIHAWQYAQSCMLITVKCENAPGDSTWQQFTPTGPRAFLPLFDDWASLVWYDAPARIRQLQGLSMTQLQVEINQHFPARLGAVMPVAAGAFPLTRRHALQYAQPGLALVGDAAHTIHPLAGQGVNLGYRDVDALIDVLASARSYGESWASHSVLKRYQTRRMADNFMMQSGMDLFYAGFSNELPPLRILRNMGLMAAQRAGVLKRQALKYALGL

SEQ ID NO: 75030 - protein, 650 aa, Salmonella typhimurium
MNILGFFQRLGRALQLPIAVLPVAALLLRFGQPDLLNMPFIAQAGGSIFDNLALVFAIGVASSWSKDSAGAAALAGAVGYFVMTKAMVTINPEINMGVLAGIITGLVGGAVYNRWSGIKLPDFLSFFGGKRFVPIATGFFCLVLAAIFGYVWPPVQHGIHAGGEWIVSAGALGSGIFGFINRLLIPTGLHQVLNTIAWFQIGEFTNAAGTVFHGDINRFYAGDGTAGMFMSGFFPIMMFGLPGAALAMYFAAPKERRPMVGGMLLSVAITAFLTGVTEPLEFLFMFLAPLLYLLHAILTGISLFVATLLGIHAGFSFSAGAIDYVLMYNLPAASNNVWMLLVMGVVFFIIYFLLFSAVIRMFNLKTPGREDKVDEMVTEEANSNTEEGLTQLATSYIAAVGGTDNLKAIDACITRLRLTVNDSARVNDAACKRLGASGVVKLNKQTIQVIVGAKAESIGDEMKKVVARGPVAAASADAAHVATPAPAAKPQAVPNAVTIAELVSPITGEVVALDQVPDEAFASKAVGDGVAVKPTDKTVVSPAAGTIVKIFNTNHAFCLETEKGAEIVVHMGIDTVALNGQGFKRLVEEGAEVTAGQPVLELDLDFLNANARSMISPVVCSNSDDFSALVIKADGHVVAGKTPLYEIKSK

SEQ ID NO: 75031 - protein, 555 aa, Salmonella typhimurium
MSEAEARPTNFIRQIIDEDLASGKHTTVHTRFPPEPNGYLHIGHAKSICLNFGIAQDYQGQCNLRFDDTNPVKEDIEYVDSIKNDVEWLGFHWSGDIRYSSDYFDQLHAYAVELINKGLAYVDELTPEQIREYRGTLTAPGKNSPFRDRSVEENLALFEKMRTGGFEEGKACLRAKIDMASPFIVMRDPVLYRIKFAEHHQTGNKWCIYPMYDFTHCISDALEGITHSLCTLEFQDNRRLYDWVLDNITIPVHPRQYEFSRLNLEYTVMSKRKLNLLVTDKHVEGWDDPRMPTISGLRRRGYTAASIREFCKRIGVTKQDNTIEMASLESCIREDLNENAPRAMAVIDPVKLVIENYPQGESEMVTMPNHPNKPEMGSREVPFSGEIWIDRADFREEANKQYKRLVMGKEVRLRNAYVIKAERVEKDAEGNITTIFCTYDADTLSKDPADGRKVKGVIHWVSAAHALPIEIRLYDRLFSVPNPGAAEDFLSVINPESLVIKQGYGEPSLKAAVAGKAFQFEREGYFCLDSRYATADKLVFNRTVGLRDTWAKAGE

SEQ ID NO: 75032 - protein, 166 aa, Salmonella typhimurium; identical to SEQ ID NO: 72989

SEQ ID NO: 75033 - protein, 320 aa, Salmonella typhimurium; identical to SEQ ID NO: 72988

SEQ ID NO: 75034 - protein, 240 aa, Salmonella typhimurium
LQVDKTSFTPLYKQLFFIICQQIQNGSLPLGSQLPTQKEIARSYNVSLIVVKQAWSELINAGIISSQRGSGSVVCSVPEGVSYGHTFRGITRDLQDASVAIENRILEIAPRRARDAQADGLSLPAQHHYLYISRIRCLNNRPFNHEKIYLDLSFFPGLELTPQALEHTSLYSLLNVTSDSAIEKVEAILPSADLCEKLQIAANKPLLSVARQTFQAGKDSPFEYCRYYVLSEYFGEIHYH

SEQ ID NO: 75035 - protein, 546 aa, Salmonella typhimurium
MAIHNRAGQPAQQSDLINVAQLTAQYYVLKPEAGNAEHAVKFGTSGHRGSAGRHSFNEPHILAIAQAIAEERAKNGITGPCYVGKDTHALSEPAFISVLEVLAANGVDVIVQENNGFTPTPAVSNAILVHNKKGGPLADGIVITPSHNPPEDGGIKYNPPNGGPADTNVTKVVEDRANALLAGGLQGVKRISLDAAMASGHVKAVDLVQPFVEGLADIVDMAAIQKAGLTLGVDPLGGSGIEYWKRIAEHYKLNLTLVNDQVDQTFRFMHLDKDGAIRMDCSSECAMAGLLALRDKFDLAFANDPDYDRHGIVTPAGLMNPNHYLAVAINYLFQHRPLWGKDVAVGKTLVSSAMIDRVVNDLGRKLVEVPVGFKWFVDGLFDGSFGFGGEESAGASFLRFDGTPWSTDKDGIIMCLLAAEITAVTGKNPQEHYNELAARFGAPSYNRLQASATSAQKAALSKLSPEMVSASTLAGDPITARLTAAPGNGASIGGLKVMTDNGWFAARPSGTEDAYKIYCESFLGEEHRKQIEKEAVEIVSEVLKNA

SEQ ID NO: 75036 - protein, 719 aa, Salmonella typhimurium
SFFLLQQGALCVTRFNDVAPDLLTAVVFFDINALQFRRKARQQVDPFFQGAEVTQDRTAPDFTRNYTQHSRRVRQSAFSRDTTFRFRQANQFDLAAQIGIVGLLRIHTDFREMRFTEHLFLQLFHVVPRIEIVHLLAKLTQGIAGITRFMLFVDGRYFRRRISFQQFFETSQQGDKLLLRHVFCRRQQEQNGVEVAFFRHNAVLAQEVGEDRGRNAKVFIFAARCINARCGEQQFARVDKVLMFGIAFKRMPVFSRNEVEEAQIAGDLRRVLPRLTINQFRYERTDVMTVFEDQFTGIDAVNHAIHPHIATADAFVHFGVNVQRGEQRIERAGGGVHHKGVVHALMRNVARLPFDMAIFFMDLRGLGETGLLFVNGLRHQNTRIVFVQFQQQRRTIGHHRNKLFIADPGGVKQDVVAQMTNFIDDLTGVINGTVVGALDDGQTEWTCFAGTLRRDFANQLAQVIFFEAVSVDPADKTIRVTRGFQINWRCARLQCAVVVRFVVVTVKQYQIARRQRVEYDFVRGGGPVQHKVGLIGVKDFRRMLLRNARRAFVNQQIAHRHVRVAVGAEERFAKVFHELITGRMTAEEFAALMPRAVKCAVALVDIIHQRAEKRRTLRFVVACCGFQLATIEGSTGFIIFEYTRDTRQILRRYAPFVMCRDKHGNTVTRCVDFIEFSVFNVVNGHDGSHVDETTLINIYNITVCRKTIRAMTANGNFFH

SEQ ID NO: 75037 - protein, 347 aa, Salmonella typhimurium
MLKFIQNNREATALLAIVCLFVFPGALDSQYLSVQTLTMVFSSAQILMLLAIGATMVMLTRNIDVSVGSTTGMCAVLLGVMLNAGYSLPVACLATLILGIVAGFFNGVLVAWLKIPAIVATLGTLGLYRGIMLLWTGGKWIEGLPAGLKQLSAPVFLGISAIGWFTLVLALLMAWLLAKTAFGRNFYATGDNLQGARQLGVRTEMVRIMAFSLNGGMAALAGIVFASQIGFIPNQTGTGLEMKAIAACVLGGISLLGGSGTVIGAILGAYFLTQIDSVLVLLRIPAWWNDFIAGLVLLGVLVFDGRLRCALQRNLRRQKYARFISPPTPLQTEAKTHAQQNKNKEVA

SEQ ID NO: 75038 - protein, 291 aa, Salmonella typhimurium
MADLDDIKDGKDFHTDKPQTNTLFALKGCGALDWGMQSRLARIFNPKTRKTVMLAFDHGYFQGPTTGLERIDINIAPLFEYADVLMCTRGILRSVVPPAINKPVVLRASGANSILTELSNEAVAVAMDDAVRLNSCAAAAQVYIGSEHEHQSIKNIIQLIDAGLRVGMPIMAVTGVGKDMARDQRYFSLATRIAAEMGAQIIKTYYVDKGFERIAAGCPVPIVIAGGKKLPEREALEMCYQAIDQGASGVDMGRNIFQSEDPVAMIKAVHAVVHHNETAERAYELFLSEKS

SEQ ID NO: 75039 - protein, 244 aa, Salmonella typhimurium
MNIDLNADLGEGCASDSELLTLVSSANIACGFHAGDAQTMLTCVREALKNGVAIGAHPSFPDRDNFGRTAMVLPPETVYAQTLYQIGALGAIVQAQGGVMRHVKPHGMLYNQAAKDPHLAQAIAKAVHDYDPSLILVGLAGSELIRAGERHRLVTRQEVFADRGYQADGSLVPRMQPGALIHDEEQALAQTLDMVQAGRVKSVTGVWTTVTAQTVCIHGDGEYALAFARRLRAAFNARNIHVIA

SEQ ID NO: 75040 - protein, 383 aa, Salmonella typhimurium
MQRKKILIVGAGLSGAVIARQLAEQGHVVNIIDQRSHIGGNAYDARDEHTGIMVHVYGPHIFHTDNETVWNYVNKYAEMMPYINKVKATVNGQVFSLPINLHTINQFFGVACSPDDARKLLLQKCDSTILEPQNFEQQALRFIGKELYEAFFKGYTIKQWGLHPSALPASVLKRIPVRFNYDDNYFNHKFQGIPKFGYTQMVKSIVEHENIAVELCRSFTQEMRTNYDHVFFSGALDAFYSCQYGRLEYRTLDFKKIICQSDYQGCAVMNYCSIDTPYTRITEHKYFSPWERHEASICYQEYSRECEAGDIPYYPVRRADKMDLLNKYLSRAKKEKNITFIGRLGTYRYLDMDITIAEALQTADVYLTSLYEQKEMPAFTVTV

SEQ ID NO: 75041 - protein, 377 aa, Salmonella typhimurium
MKRLCYFVNSDWYFDLHWTERAIAARDAGYEIHIISHFIGEEIIKKFKTLGFICHNVSLVAQSFNMFVFFRAFLNARKIIKEINPDLLHCITLKPCLIGGVSARRSNSPVVISFVGLGRIFLYNTVPMRILRALTVLVYKYIAGNKRGVFIFEHDKDRRKISRLVGIDYHKTIVIEGAGINPDIYKFSIEKKHEIPIVLFASRMLWSKGLGDLIEAKKILRQKNIHFVLNVAGILAEDDKDAIPLELIHHWHNEGLINWLGRSSNVYELIQKSNIVALPSIYPEGVPRLLLEASSVGRACIAYDTGGCDSLIIHNYNGLIVKSNSAQELAVELEYLLKNPQIRLEMGANGRKRVKELFSSILVINKTLQIYKDTIGC

SEQ ID NO: 75042 - protein, 236 aa, Salmonella typhimurium; identical to SEQ ID NO: 73459

SEQ ID NO: 75043 - protein, 588 aa, Salmonella typhimurium
MKLPVREFDAVVIGAGGAGMRAALQISQSGQTCALLSKVFPTRSHTVSAQGGITVALGNTHEDNWEWHMYDTVKGSDYIGDQDAIEYMCKTGPEAILELEHMGLPFSRLDDGRIYQRPFGGQSKNFGGEQAARTAAAADRTGHALLHTLYQQNLKNHTTIFSEWYALDLVKNQDGAVVGCTALCIETGEVVYFKARATVLATGGAGRIYQSTTNAHINTGDGVGMALRAGVPVQDMEMWQFHPTGIAGAGVLVTEGCRGEGGYLLNKHGERFMERYAPNAKDLAGRDVVARSIMIEIREGRGCDGPWGPHAKLKLDHLGKEVLESRLPGILELSRTFAHVDPVKEPIPVIPTCHYMMGGIPTKVTGQALTVNEQGEDVVIPGLFAVGEIACVSVHGANRLGGNSLLDLVVFGRAAGLHLQESIAEQGVLRDASESDVEGSLERLNRWNNNRNGEDPVAIRKALQECMQHNFSVFREGDAMAKGLEQLKVIRERLKNARLDDTSSEFNTQRVECLELDNLMETAYATAVSANFRTESRGAHSRFDFPERDDANWLCHTLYQPQTESMTRRSVNMEPKLRPAFPPKIRTY

SEQ ID NO: 75044 - protein, 933 aa, Salmonella typhimurium
MQNSALKAWLDSSYLSGSNQSWIEQLYEDFLTDPDSVDANWRLTFQQLPGTGVKPDQLHSKTREYFRRQALAGSRHSSTISDPDTNVKQVKVLQLINAYRFRGHQHANLDPLGLWKQERVADLDPSFHDLTEADFQETFNVGSFASGKETMKLGELLDALKQTYCGPIGAEYMHITSTEEKRWIQQRIESGRAAFSADEKKRFLNELTAAEGLERYLGAKFPGAKRFSLEGGDALIPMLKEMVRHAGNSGTREVVLGMAHRGRLNVLINVLGKKPQDLFDEFAGKHKEHLGTGDVKYHMGFSSDIETEGGLVHLALAFNPSHLEIVSPVVMGSVRARLDRLDEPSSNKVLPITIHGDAAVTGQGVVQETLNMSKARGYEVGGTVRIVINNQVGFTTSNPLDARSTPYCTDIGKMVQAPIFHVNADDPEAVAFVTRLALDFRNTFKRDVFIDLVCYRRHGHNEADEPSATQPLMYQKIKKHPTPRKIYADKLEADKVATLEDATEMVNLYRDALDAGECVVKEWRPMNMHSFTWSPYLNHEWDEAYPNKVEMKRLQELAKRISTVPEAIEMQSRVAKIYGDRQAMAAGEKLFDWGGAENLAYATLVDEGIPVRLSGEDSGRGTFFHRHAVIHNQTNGSTYTPLQHIHSGQGQFKVWDSVLSEEAVLAFEYGYATAEPRTLTIWEAQFGDFANGAQVVIDQFISSGEQKWGRMCGLVMLLPHGYEGQGPEHSSARLERYLQLCAEQNMQVCVPSTPAQVYHMLRRQALRGMRRPLVVMSPKSLLRHPLAVSTLDELANGSFQPAIGEIDELDPKAVKRVVMCSGKVYYDLLEQRRKNDQKDVAIVRIEQLYPFPHKAVQEALQPYAHVHDFVWCQEEPLNQGAWYCSQHHFREVTPFGAALRYAGRPASASPAVGYMSVHQKQQQDLVNDALNVD

SEQ ID NO: 75045 - protein, 289 aa, Salmonella typhimurium
MSVLINKDTKVICQGFTGSQGTFHSEQAIAYGTQMVGGVTPGKGGTTHLGLPVFNTVREAVEATGATASVIYVPAPFCKDSILEAIDAGIKLIITITEGIPTLDMLTVKVKLDEAGVRMIGPNCPGVITPGECKIGIMPGHIHKPGKVGIVSRSGTLTYEAVKQTTDYGFGQSTCVGIGGDPIPGSNFIDILKLFQEDPQTEAIVMIGEIGGSAEEEAAAYIKDHVTKPVVGYIAGVTAPKGKRMGHAGAIIAGGKGTADEKFAALEAAGVKTVRSLADIGEALKAIIK

SEQ ID NO: 75046 - protein, 522 aa, Salmonella typhimurium
MLDIVELSRLQFALTAMYHFLFVPLTLGMAFLLAIMETVYVLSGKQIYKDMTKFWGKLFGINFALGVATGLTMEFQFGTNWSYYSHYVGDIFGAPLAIEGLMAFFLESTFVGLFFFGWDRLSKVQHMCVTWLVALGSNLSALWILVANGWMQNPIAADFNFETMRMEMVSFSELVLNPVAQVKFVHTVASGYVTGAMFILGISAYYMLKGRDFAFAKRSFAIAASFGMAAVLSVIVLGDESGYEMGDVQKTKLAAIEAEWETQPAPASFTLFGIPDQDKQENHLAIQIPYALGIIATRSVDTPVIGLKDLMVQHEERIRNGMKAYELLEQLRAGSTDQAVRDQFNSMKKDLGYGLLLKRYTPNVTDATEAQIQQATKDSIPRVAPLYFAFRIMVACGFLLLAIIALSFWSVIRNRIGEKKWLLRAALYGIPLPWIAVEAGWFVAEYGRQPWAIGEVLPTAVANSSLTVGDLLFSMFLICGLYTLFLVAELFLMFKFARLGPSSLKTGRYHFEQSTVTSQPAR

SEQ ID NO: 75047 - protein, 407 aa, Salmonella typhimurium
VSKATEQNDKLKRAIIISAVLHIILFAVLIWSSFDEHIEASAGGGGGSAIDAVMVDPGAVVQQYNRQQDQQASARRAEEERKKLQQQQAEELQQKQAAEQERLKQLEKERLAAQEQQKQAEEAAKLAQQQQQQAEEAAKAAADAKKKAEAEAAKAAADAKKKAEAEAVKAAADAKKKAEAEAAKAAADAKKKAEAEAAKAAAEAKKKAEAEAAKAAAEAKKKADAEAAKAAAEAKKKADAAAAKAAAEAKKKADAAAAKAAADAKKKAAAEKAAAAEGVDDLLGDLSSGKNAPKTGGGAKGNGQPSKDSGTSGANGGATGADISAYAKQIQVAIQSRLYDASLYQGKQCVLHISLAPDGSLKSITSEGGDPALCQAALMAAKTAKIPKPPSQAVYEKIKDAKLDFKL

SEQ ID NO: 75048 - protein, 262 aa, Salmonella typhimurium
MSSNFRHHLLSLSLLVGIAAPWAAFAQAPISSVGSGSVEDRVTQLERISNAHSQLLTQLQQQLSDNQSDIDSLRGQIQENQYQLNQVMERQKQIMLQLGSLNNGGAAQPAAGDQSGAATTATPAPDAGTATSGAPVQSGDANTDYNAAIALVQDKSRQDDAIVAFQNFIKKYPDSTYQPNANYWLGQLNYNKGKKDDAAYYFASVVKNYPKSPKAADAMYKVGVIMQDKGDTAKAKAVYQQVINKYPGTDGAKQAQKRLNAM

SEQ ID NO: 75049 - protein, 457 aa, Salmonella typhimurium
MFSEIMRYILDLGPTVMLPLVIIVFSKLLGMKLGDCFKSGLHIGIGFVGIGLVIGLMLDSIGPAAKAMAEHFQINLHVIDVGWPGSSPMTWASQIALVAIPVAIGVNVLMLVTRMTRVVNVDIWNIWHMTFTGAMLHLATGSYWLGILGVVVHAAFVYKLGDWFAKDTRDYFGLEGIAIPHGSSAYLGPVAVLVDTIIEKIPGLNRIHFSADDVQKRFGPFGEPVTVGFVMGLVIGVLAGYDAKAVLQLAVKTAAVMLLMPRVIKPIMDGLTPIAKHARKRLQAKFGGQEFLIGLDPALLLGHTSVVSASLIFIPLTILIAVLVPGNQVLPFGDLATIGFFIAMAVAVHQGNLFRTLISGVIIMGITLWIATQTIGLHTQLAANAGALKAGGQVASLDQGGSPITWLLIQLFTWQNIVGFAVIAIIYLAGVLLTWRRARQFVAAEKATALQQSQIAS

SEQ ID NO: 75050 - protein, 347 aa, Salmonella typhimurium
MKSVVIHAEGDVRVEERPLPQLQAEDDVLVKVVSSGLCGSDIPRIFAQGAHYYPITLGHEFSGYVESYGTGVTDMQPGDAVACVPLLPCFHCPQCERGYFSLCKQYQFVGSRSEGGNAEYVVVKRANLFRLPSDMPIEDGAFIEPITVGLHAFHLAQGCEGKNVIIVGAGTIGLLALQCARELGARSVTAIDINPQKLELAKALGATHTCNSREMTADDIQTALSDIQFDQLVLETAGTPQTVSLAIDIAGPRAQLALVGTLHHDLTLTTRTFGLILRKELTLLGSWMNYSAPWPGEEWETAARLLAEKRLQLTPLIAHRGDAESFAEAVKALNGAPMQGKILLQLS

SEQ ID NO: 75051 - protein, 477 aa, Salmonella typhimurium
MRFSRFIIGLTTSIAFSVQAANIDEYIKQLPAGANLALMVQKIGAPAPAIDYHSQQMALPASTQKVITALAALIQLGPDFRFTTTLETKGNVDNGILKGDVIARFGGDPTLKRQDIRNMVATLKKSGVTQIDGNVLIDTSIFASHDKAPGWPWNDLTQCFSAPPAAAIVDRNCFSVSLYSAQKPNDLAFIRVASYYPVTMFSQVRTLPRGSADAQYCELDVVPGDLNRYTLTGCLPQRADPLPLAFAIQDGASYAGAILKQELKEAGITYRGTLLRQTQVNEPGTIVASKQSAPLHDLLKIMLKKSDNMIADTVFRMIGHVRFNVPGTWRAGSDAVRQILRQQAGIDIGNTIIADGSGLSRHNLIAPATMMQVLQYIAQHDNELNFISMLPLAGYDGSLQYRAGLHQAGVDGKVSAKTGSLQGVYNLAGFITTASGQRMAFVQYLSGYAVPPADQRNRRIPLVRFESRLYKDIYQNN

SEQ ID NO: 75052 - protein, 323 aa, Salmonella typhimurium
MNLEKINELTAQDMAGVNATILEQLNSDVQLINQLGYYIISGGGKRIRPMIAVLAARAVGYQGNAHVTIAALIEFIHTATLLHDDVVDESDMRRGKATANAAFGNAASVLVGDFIYTRAFQMMTSLGSLKVLEVMSEAVNVIAEGEVLQLMNVNDPDITEENYMRVIYSKTARLFEAAAQCSGILAGCTPEQEKGLQDYGRYLGTAFQLIDDLLDYSADGEHLGKNVGDDLNEGKPTLPLLHAMRHGTPEQSAMIRTAIEQGNGRHLLEPVLEAMTTCGSLEWTRQRAEEEADKAISALQILPDTPWREALIGLAHIAVQRDR

SEQ ID NO: 75053 - protein, 272 aa, Salmonella typhimurium
MSHCSCHDKPQHSLLPAAYRILSITRHTPLEWNFRVAVDFPAHWGQFVEVSLPRVGEAPISVSDYGDGWIDLLIRNVGKVTSALFTLKEGDNVWLRGCYGNGYPVDTLRHKPLLVVAGGTGVAPVKGLMRYFVENPQEIGQLDMILGYKNRDCVLYKEEMATWRGKHNLVLTLDEGEADDRYQIGRVTDRLADMTLSDIDTMQAIVVGPPIMITFTVKMLLQKGLKPEQIWVDYERRMACSVGKCGHCRMGEVYVCTDGPIFNYAVAQRFAD

SEQ ID NO: 75054 - protein, 284 aa, Salmonella typhimurium
MVLMIVSGRSGSGKSVALRALEDMGFYCVDNLPVVLLPDLARTLADRQISAAVSIDVRNMPESPEIFEQAMNNLPGAFSPQLLFLDADRNTLIRRYSDTRRLHPLSSKNLSLESAIDKESDLLEPLRSRADLIVDTSEMSVHELAEMLRTRLLGKRERELTMVFESFGFKHGIPIDADYVFDVRFLPNPHWDPKLRPMTGLDKPVAAFLDRHTEVHNFIYQTRSYLELWLPMLETNNRSYLTVAIGCTGGKHRSVYIAEQLADYFRSRGKNVQSRHRTLEKRKT

SEQ ID NO: 75055 - protein, 441 aa, Salmonella typhimurium
MYHGQLKNILLLSLRFIMDKLSYASDSSTSAWNTYLQQIERVAPYLGELSPWVDTLRHPKRALIVDIPVQMDDGTIRHFEGYRVQHNLSRGPGKGGVRYHPDVDLNEVMALSAWMTIKCAALNLPYGGAKGGIRVDPFSLSEGELERLTRRYTSEIGIIIGPQKDIPAPDVGTNGKVMAWMMDTYSMNHGTTVTGVVTGKPIHLGGSLGREKATGRGVFVSGLEAARRANIAVEGARVAVQGFGNVGSEAARLFAGAGARVVAIQDHTATLFNATGIDMKALTAWQTEHKQIAGFPGAETIASDAFWRLEMDILIPAALEGQITRQRAEALTCKLVLEGANGPTYPDADDVLASRGILVVPDVVCNAGGVTVSYFEWVQDMASFFWSEEEINARMDKIMTDAIVHVWEKAAEKSCSLRTAAYIVACERILLARKDRGIYPG

SEQ ID NO: 75056 - protein, 443 aa, Salmonella typhimurium
MSSVKKIGLFACTGVVAGNMMGSGIALLPANLASIGGIAIWGWVISIIGAMSLAYVYARLATKNPQQGGPIAYAGEISPAFGFQTGVLYYHANWIGNLAIGITAVSYLSTFFPALNNPIPAGIACIAIVWLFTFINMLGGAWVSRLTTIGLFLVLIPVVLTAVAGWHWFDIATYHANWNTSTTTDSHAIVKSILLCLWAFVGVESAAVSTGMVKNPKRTVPLATMLGTALAGIIYIAATQVIAGMFPASVMASSGAPFAISTSTILGGWAAPLVSAFTAFACLTSLGSWMMLVGQAGVRAANDGNFPKIYGEMDKNGIPKKGLLLAAVKMTALMILITIMNSSGGKASDLFGELTGIAVLLTMLPYFYSCVDLIRFEGFNIRNSVSLICSVLGCAFCFIALMGASSFELSGTFIVSLIILMFYGRKMHQRQNNDSDNNTAEAL

SEQ ID NO: 75057 - protein, 1486 aa, Salmonella typhimurium
MLYDKSLEKDNCGFGLIAHIEGEPSHKVVRTAIHALARMQHRGAILADGKTGDGCGLLLQKPDRFFRIVAEERGWRLAKNYAVGMIFLNKDPELAAASRHIVEEELQQETLSIVGWRDVPTNEGVLGEIALSSLPRIEQIFVNAPAGWRPRDMERRLFIARRRIEKRLQDDKDFYVCSLSNLVNIYKGLCMPADLPRFYLDLADLRLESAICLFHQRFSTNTVPRWPLAQPFRYLAHNGEINTITGNRQWARARTYKFQTPLIPDLQSAAPFVNETGSDSSSLDNMLELLLAGGMDIIRAMRLLVPPAWQNNPDMDQDLRAFFDFNSMHMEPWDGPAGIVMSDGRFAACNLDRNGLRPARYVITKDKLITCASEVGIWDYQPDEVVEKGRVGPGELMVIDTRGGRILHSAETDDDLKSRHPYKEWMEKNVRRLVPFEELPDEEVGSRELDDDLLASYQKQFNYSAEELDSVIRVLGENGQEAVGSMGDDTPFAVLSSQPRIIYDYFRQQFAQVTNPPIDPLREAHVMSLATSIGREMNVFCEAEGQAHRLSFKSPILLYSDFKQLTTMKEEHYRADRLDITFDVTETTLNATVKALCDKAEQMVRNGTVLLVLSDRNIGKNRLPVPAPMAVGAVQTRLVEQSLRCDANIIVETGSARDPHHFAVLLGFGATAIYPYLAYETLGRLIDTQAIAKNYRTVMQNYRNGINKGLYKIMSKMGISTIASYRCSKLFEAVGLHDDVVNLCFQGVVSRIGGASFDDFQQDLLNLSKRAWLARKPISPGGLLKYVHGGEYHAYNPDVVRTLQQAVQSGEYSDYQEYAKLVNERPASTLRDLLAIHPDGEAVTIDEVEPASELFKRFDTAAMSIGALSPEAHEALAEAMNSLGGNSNSGEGGEDPARYGTNKVSRIKQVASGRFGVTPAYLVNADVIQIKVAQGAKPGEGGQLPGDKVTPYIAKLRYSVPGVTLISPPPHHDIYSIEDLAQLIFDLKQVNPKAMISVKLVSEPGVGTIATGVAKAYADLITIAGYDGGTGASPLSSVKYAGCPWELGLVETQQALVANGLRHKIRLQVDGGLKTGVDIIKAAILGAESFGFGTGPMVALGCKYLRICHLNNCATGVATQDDKLRKNHYHGLPFKVTNYFEFIAREVRELMASLGVTRLVDLIGRTDLLKELEGFTAKQQKLALSRLLETAEPHPGKALYCTENNPPFDNGVLNAQLLQQAKPFVDARQSKTFWFDIRNTDRSVGASLSGYIAQTHGDQGLASDPIKAHFSGTAGQSFGVWNAGGVELYLTGDANDYVGKGMAGGLIAIRPPVGSAFLSHKASIIGNTCLYGATGGRLYAAGRAGERFGVRNSGAITVVEGIGDNGCEYMTGGIVCVLGKTGVNFGAGMTGGFAYVLDEDGEFRKRVNPELVEVLDVDSLAIHEEHLRGLITEHVQHTGSQRGEEILSRWSSFSTQFALVKPKSSDVKALLGHRSRSAAELRVQAQ

SEQ ID NO: 75058 - protein, 472 aa, Salmonella typhimurium
MSQNVYQFIDLQRVDPPKKPLKIRKIEFVEIYEPFSEGQAKAQADRCLSCGNPYCEWKCPVHNYIPNWLKLANEGRIFEAAELSHQTNTLPEVCGRVCPQDRLCEGSCTLHDEFGAVTIGNIERYINDKAFEMGWRPDITGVRQTDKRVAIIGAGPAGLACADVLTRNGVKAVVFDRHPEIGGLLTFGIPAFKLEKEVMTRRREIFTGMGIEFKLNTEVGRDVQLEDLLKDYDAVFLGVGTYQSMRGGLENEDADGVFDALPFLIANTKQIMGFGETSDEPYVSMEGKRVVVLGGGDTAMDCVRTSIRQGATHVTCAYRRDEENMPGSRREVKNAREEGVEFQFNVQPLGIEVNANGKVSGVKMVRTEMGEPDAKGRRRAEIVAGSEHVVPADAVVMAFGFRPHSMEWLAKHSVELDSQGRIIAPERSDNAFQTSNPKIFAGGDIVRGSDLVVTAIAEGRKAADGIMNYLEV

SEQ ID NO: 75059 - protein, 510 aa, Salmonella typhimurium
MAMIDSMNKDTTRLSDGPDWTFELLDVYLAEIDRVAKLYQLDTYPHQIEVITSEQMMDAYSSVGMPINYPHWSFGKKFIETERLYKHGQQGLAYEIVINSNPCIAYLMEENTITMQALVMAHACYGHNSFFKNNYLFRSWTDASSIVDYLIFARNYITRCEERYGVDEVEKLLDSCHALMNYGVDRYKRPQKISLQEEKARQKSREEYLQSQVNMLWRTLPKREEEKTVAEARRFPAEPQENLLYFMEKNAPLLEPWQREILRIVRKVSQYFYPQKQTQVMNEGWATFWHYTILNHLYDEGKVTERFMLEFLHSHTNVVFQPPYNSPWYSGINPYALGFAMFQDIKRICQSPTDEDKYWFPDIAGSDWLETLHFAMRDFKDESFISQFLSPKVMRDFRFFTVLDDDRHNYLEISAIHNEEGYREIRSKLSSQYNLSNLEPNIQVWNVDLRGDRSLTLRYIPHNRAPLDKGRKEVLKHVHRLWGFDVMLEQQNEDGSVELLERCPPRMNML

SEQ ID NO: 75060 - protein, 514 aa, Salmonella typhimurium
LKKLKINYLFIGILTLLLAAALWPSIPWFGKTENHIAAIQARGVLRVSTIDSPLTYSVINGKKYGLDYELAQQFANYLGVKLKVTVRQNISQLFDDLDNGNADLLAAGLVYDSARVKNYQPGPMYYSVSQQLVYRVGQYRPRSLATVNENQLTIAPGHVVVNDLQRLKETKFPDLSWKVDDKKGSTTLLEEVISGKLDYTIADSVAISLFQRVHPELAVALDVTDEQPVTWFSRLDDDNTLSAALLDFFNSINEDGSLARIEEKYLGHGDDFDYVDTRSFLRAVDNVLPELEPLFKKYAKEIDWRLLAAISYQESHWDPLATSPTGVRGLMMLTKNTAQSLGLTDRTDAEQSISGGARYLEDMMAKVPETVPEDERIWFALAAYNMGYAHMLDARSLTVKTKGNPDSWTDVKQRLPLLSQKPYYSKLTYGYARGHEAYAYVENIRKYQISLVGYLQEKEKQEAEAMKLAQDYPAVSPEELNKAPFPFLSFLSQSSGYLTHSPSLLFTPQKKEEK

SEQ ID NO: 75061 - protein, 282 aa, Salmonella typhimurium
MNCLIRIRQRYPDLAQSDRKLADYLLAQPDTARHLSSQQLAAEAGVSQSSVVKFAQKLGFKGFPALKLALSEALASNPNPHSVPVHNQIRGDDPMRLVGEKLIKENVAAMHATLDVNSEEKLLESVTMLRHARRIVITGIGASGLVAQNFAWKLLKIGINAVVERDMHALLATVQALAPEDLLLAISYSGERRELNLAADETLRAGAKILAITGFSPNALQQRATRCLYTIAEEQATRSAAISSTHAQMMLTDLLFMALVQQDLERAPERIRHSEALVKKLV

SEQ ID NO: 75062 - protein, 308 aa, Salmonella typhimurium
MNIKQLHSFLILCDELHYGRAASRLFITQPSLSQQIKQLESSLKTILFKRKGRGIKLTKAGIILQRHANKIMLDLKNAENELLPYQDQQRDTISIGVSGSYLVLPAFRNFMAHHPEISLNVKEFSTEQTIKKLTDSAVDIGIVYRTALPAQLSSTMLFEDEIIAAIPLSHPLATRERLHLKDLNDQPIIVLNDSLLLRGIITTEFNNRKVVPNVICELDNHYSCLEYAEAQIGIAFITRSLTHLSTPKNVRLVSLGIPAFFIPVMLVHSNDLSLDNATICLLKQIKNFYTVDNKSAPEKSWPEQKIGV

SEQ ID NO: 75063 - protein, 86 aa, Salmonella typhimurium
MALLITKKCINCDMCEPECPNEAISMGDSIYEINSDKCTECVGHYETPTCQKVCPIPNTILQDPAHVESEEQLWDKFVLMHHADKL

SEQ ID NO: 75064 - protein, 134 aa, Salmonella typhimurium
MFMTWEYALIGLVVGIIIGAVAMRFGNRKLRQQQALQYELEKNKAELEEYREELVSHFARSAELLDTMAHDYRQLYQHMAKSSSSLLPEMSAESNPFRNRLAESEASNDQAPVQMPRDYSEGASGLLRSGAKRD

SEQ ID NO: 75065 - protein, 455 aa, Salmonella typhimurium
MKKHTQLLSALALSVGLTLSAPFPALASIPGQVPGQATLPSLAPMLEKVLPAVVSVKVEGTAAQSQKVPEEFKKFFGEDLPDQPSQPFEGLGSGVIIDAAKGYVLTNNHVINQAQKISIQLNDGREFDAKQIGGDDQSDIALLQIQNPSKLTQIAIADSDKLRVGDFAVAVGNPFGLGQTATSGIISALGRSGLNLEGLENFIQTDASINRGNSGGALLNLNGELIGINTAILAPGGGSIGIGFAIPSNMAQTLAQQLIQFGEIKRGLLGIKGTEMTADIAKAFKLNVQRGAFVSEVLPNSGSAKAGVKSGDVIISLNGKQLNSFAELRSRIATTEPGTKVKLGLLRDGKPLEVEVTLDSNTSSSASAEMIAPALQGATLSDGQLKDGTKGVKVDSVEKSSPAAQAGLQKDDVIIGVNRDRISSIAEMRKVMAAKPSIIALQVVRGNENIYLLLR

SEQ ID NO: 75066 - protein, 616 aa, Salmonella typhimurium
LLGGWNRKKANGTGDITRARRRRQAGEKRGAIGPHHQPVITNHHPAIVRIANQPPHPLLQRNHRVGQLNLIKRIATAQTTVFHSRFQRVVRGGKRQFVDNHQRRIAAHVHPFPEAAGGDEQRVAGANKLLQLAFTGFPLQQYRQRHGGAKLLRQIAHHGVGAQHKTSPVIGFDNRPEHSRQLSRRAGLVGLRVTRYAERLARIVEWAGQHGFCLFNSKTGGKVVKIIIYRQRGGKNPATGLLFHHLFEFVRHGERRQRQGEMARGALIPVAVSRLIDLFAFQPTVRGAFKSRIQQRRTAQRQLRHVVTKLQRIIQQKCPLDTVGQFTQISPVAGLPQLQTKILGALGKAIGAFLQLLSVFQFRPVGDGDVFCIQQLTAGERLSEILAGDVRQLVGFIEDHYFSLRDKFAKPALFNHHIRKKVVVYNHHIRVHRLFTRFHHKALFVERAIAAKAVVVGTGDQRPGLGILRHADAGADIAIPRLIPGAQQYHVARLYRIAARQRLLFQPLQAEVVTSFQQGRLTGKRQRFCYRRQIAAVELILQRFRPGRNNDFFPGAQRRSEVSIGLPGSGAGFNNQRLRIFNRLCYGNRHLSLWFARFKAGYRFGQLAICCKIVRH

SEQ ID NO: 75067 - protein, 454 aa, Salmonella typhimurium
MMKTLSPTVITLPWRPDAAEHYFAPVNHLPWAMLLHSGDAIHPYNRFDILVADPVTTLTTRAQETTVCTARTTTVTLDDPLHVLQTQLEALPFHPQPDPDLPFQGGALGLFGYDLGRRFEILPDTAARDIALPDMAIGLYDWALIVDHQKQVVSLISYHDADARYRWLTSQRAPTRTPFRLTSAWQSNMTRCEYGEKFRQVQAWLHSGDCYQVNLSQRFQASYEGDEWQAFERLNRANRAPFSAFLRLHDGAILSLSPERFIQLENGHIQTRPIKGTLPRLNDPQADRQQAQKLANSMKDRAENLMIVDLMRNDIGRVAVPGSVKVPELFVVEPFPAVHHLVSTITARLPDSLHATDLLRAAFPGGSITGAPKVRAMEIIDELEPQRRNAWCGSIGYLSFCGKMDTSITIRTVTATQGQLYCSAGGGIVADSNEEAEYQETFDKVNRILHPLEN

SEQ ID NO: 75068 - protein, 192 aa, Salmonella typhimurium
VDTSRLTLDHFLSRFQLLRPQMTHETLNQRQAAVLIPVVRRPQPGLLLTQRAIHLRKHAGQVAFPGGAVDSTDASLIAAALREAQEEVAIPPQAVEVIGVLPPVDSVTGFQVTPVVGIIPPNLPWRASEDEVSAVFEMPLAQALQLGRYHPLDVYRRGNSHRVWLSWYEHYFVWGMTANILRELALQIGVKP

SEQ ID NO: 75069 - protein, 454 aa, Salmonella typhimurium
VISLFDMFKVGIGPSSSHTVGPMKAGKQFVDDLVEKGLLDNVTRVAVDVYGSLSLTGKGHHTDIAIIMGLAGNEPATVDIDSIPGFIRDVETRERLLLAQGRHEVDFPKDDGMRFHNGNLPLHENGMQIHAWHDDTVIYSKTYYSIGGGFIVDEEHFGQEATNEVTVPYPFKSAKEMLEYCNSTGLSLSGMVMQNELALHSKKEIEEYFGHVWQTMQACIDRGMNTEGVLPGPLRVPRRASALRRMLVSSDKLSSDPMNVIDWVNMFALAVNEENAAGGRVVTAPTNGACGIVPAVLAYYDHFIESVSPDIYTRYFLAAGAIGALYKMNASISGAEVGCQGEVGVACSMAAAGLAELLGASPEQVCVAAEIGMEHNLGLTCDPVAGQVQVPCIERNAIASVKAINAARMAMRRTSAPRVSLDKVIETMYETGKDMNAKYRETSRGGLAIKVQCD

SEQ ID NO: 75070 - protein, 322 aa, Salmonella typhimurium
VTIAIVIGTHGWAAEQLLKTAEMLLGEQENVGWIDFVPGENAETLIEKYNAQLAKLDTSKGVLFLVDTWGGSPFNAASRIVVDKERYEVIAGVNIPMLVETFMARDDDPSFDELVALAVETGREGVKALKAKPVEKAAPAPVAAAPKAAAPAKPMGPNDYMVIGLARIDDRLIHGQVATRWTKETNVSRIIVVSDEVAADTVRKTLLTQVAPPGVTAHVVDVAKMIRVYNNPKYAGERVMLLFTNPTDVERIVEGGVKVTSVNIGGMAYRQGKTQVNNAVSVDEKDIEAFKKLNERGIELEVRKVSTDPKLKMMDLIAKVAK

SEQ ID NO: 75071 - protein, 416 aa, Salmonella typhimurium
VFAHQNASFPPRPEGRGGKEAVFRLTVFCIITFSSLICEAMKRAYKYRFYPTTEQAELLAQTFGCVRFVYNSILRWRTDAYYERKEKIGYLQANARLTALKKEPEFAWLNDVSCVPLQQSLRHQQTAFANFFAGRAAYPAFKSKRHKQAAEFTASAFKYRDGKLYMAKNKIPLDVRWSRPLPSVPSTVTISKDAAGRYFVSCLCEFEPASLPITSSMVGIDVGLKDLFVTDTGFRSGNPRHTAKYAARLALLQRRLSKKAKGSKNRAKAHLKVARLHAKIADCRLDALHKATRKLINDNQVVCVESLKVRNMIRNPSLSKAIADASWGELVRQLRYKGEWAGRSVVAIDQFFPSSKRCSCCGFIMKKMPLDVRKWQCPECGTDHDRDVNAARNIKAAGLAVLAHGEPVNPESLKAA

SEQ ID NO: 75072 - protein, 131 aa, Salmonella typhimurium
MELQLMLNHFFERVRKDANFNAFLIDLEYNNIAYYIYFVATGNVKIITHAGHFISIKSNRKLIKVNSTPNTQLIKLISAKHFSGEHSYEKYCTDLATAGVFKWIVELNQKTRQYWSKDNQLLYIENVVMPL

SEQ ID NO: 75073 - protein, 304 aa, Salmonella typhimurium
MRKVSISILFMLVSLTWGTTWLAMRIAVETIPPVFATGMRFMFAAPFLIIIAWLRKKTLLFPPGQRLFQFVICIFYFCIPFSLMIYGETYVNSGLAAIIFANMPVAVLIASVLFLNEKAKLMQIAGLTIAITALTGILLEETNTSTESHWQGITALISAVLIHAIIYTQCKKRSCTVSVITFNALPCLLAGLILSATGWFFERPQVSTFSVHSILATLYLGAFAGVFGILCYFALQQKANAFQASLVFLIFPLIAVSLEDYIYGYAISTHSMLLIIPLVIGIFLTLVARNLPVTSRCRDNSSQK

SEQ ID NO: 75074 - protein, 232 aa, Salmonella typhimurium
MLRIIDTETCGLQGGIVEIASVDVIDGNIVNPMSHLIRPDRPITPQAMAIHRITEAMVADKPWIEDVIPLYYGSEWYVAHNASFDRRVLPELPGEWICTMKLSRRLWPGIKYSNMALYKSRKLSVQTPPGLHHHRALYDCYITAALLIDIMRTTGWTAEEMVNITGRPALLTTFPFGKYRGKAVSEVAKRDPGYLRWLFNNLDNMSPELRLTLKHYLEDVQAGEQRSNGTPQ

SEQ ID NO: 75075 - protein, 480 aa, Salmonella typhimurium
MSRRLRRTKIVTTLGPATDRDNNLEKVIAAGANVVRMNFSHGSPEDHKMRADKVREIAAKLGRHVAILGDLQGPKIRVSTFKEGKVFLNIGDKFLLDANLGKGEGDKEKVGIDYKGLPADVVPGDILLLDDGRVQLKVLEVQGMKVFTEVTVGGPLSNNKGINKLGGGLSAEALTEKDKADIQTAALIGVDYLAVSFPRCGEDLNYARRLARDAGCDAKIVAKVERAEAVCDQNAMDDIILASDVVMVARGDLGVEIGDPELVGIQKALIRRARQLNRAVITATQMMESMITNPMPTRAEVMDVANAVLDGTDAVMLSAETAAGQYPSETVAAMARVCLGAEKIPSINVSKHRLDVQFDNVEEAIAMSAMYAANHLKGVTAIITMTESGRTALMTSRISSGLPIFAMSRHERTLNLTALYRGVTPVHFDSAADGVVAAHEAVNLLRDKGYLVSGDLVIVTQGDVMSTVGSTNTTRILTVE

SEQ ID NO: 75076 - protein, 518 aa, Salmonella typhimurium
MKVKLLAAGILFTLPFWACAKDVTIIYTNDLHAHVEPYKVPWIADGKRDIGGWANITTLVKQEKAKNKATWFFDAGDYFTGPYISSLTKGKAIIDILNTMQYDAATIGNHEFDHGWDNTLLQLSRAKFPIVQGNIFYEDSSKSFWDKPYTIVEKDGVKIGVIGLHGVFAFNDTVSAATRVGIEARDEIKWLQRYIDELKGKVDLTVALIHEGTPARQSSMGNTDVRRALDKDIQTASQVKGLDILITGHAHVGTPEPIKVGNTLILSTDSGGIDVGKLVLDYKEKPHHFTVKNFELKTIFADEWKPDPQTKQVIDGWNKKLDKVVQQTVAQSPVELTRAYGESSSLGNLAADALLFTAGKDTQLALTNSGGIRNEIPAGAVTMGAVISTFPFPNELVTMDLTGKQLRSLMEHGAGLSNGVLQVSKGLEMKYDSSKPIGQRVTVLTLNGKPIDDATVYHIATNSFLADGGDGFAAFTEGQARNTSGGYYVSNAIVDYFKAGNTITDEQLKGMRVADVKK

SEQ ID NO: 75077 - protein, 726 aa, Salmonella typhimurium
MSTTDDTHNTLSTGKCPFHQGGHDRSAGAGTASRDWWPNQLRVDLLNQHSNRSNPLGEDFDYRKEFSKLDYSALKGDLKALLTDSQPWWPADWGSYVGLFIRMAWHGAGTYRSIDGRGGAGRGQQRFAPLNSWPDNVSLDKARRLLWPIKQKYGQKISWADLFILAGNVALENSGFRTFGFGAGREDVWEPDLDVNWGDEKAWLTHRHPEALAKAPLGATEMGLIYVNPEGPDHSGEPLSAAAAIRATFGNMGMNDEETVALIAGGHTLGKTHGAAAASHVGADPEAAPIEAQGLGWASSYGSGVGADAITSGLEVVWTQTPTQWSNYFFENLFKYEWVQTRSPAGAIQFEAVDAPDIIPDPFDPSKKRKPTMLVTDLTLRFDPEFEKISRRFLNDPQAFNEAFARAWFKLTHRDMGPKARYIGPEVPKEDLIWQDPLPQPLYQPTQEDIINLKAAIAASGLSISEMVSVAWASASTFRGGDKRGGANGARLALAPQRDWDVNAVAARVLPVLEEIQKTTNKASLADIIVLAGVVGIEQAAAAAGVSISVPFAPGRVDARQDQTDIEMFSLLEPIADGFRNYRARLDVSTTESLLIDKAQQLTLTAPEMTVLVGGMRVLGTNFDGSQNGVFTDRPGVLSTDFFANLLDMRYEWKPTDDANELFEGRDRLTGEVKYTATRADLVFGSNSVLRALAEVYACSDAHEKFVKDFVAAWVKVMNLDRFDLQ

SEQ ID NO: 75078 - protein, 458 aa, Salmonella typhimurium
MALWGGRFTQAADQRFKQFNDSLRFDYRLAEQDIVGSVAWSKALVTVGVLTADEQRQLEEALNVLLEEVRANPQQILQSDAEDIHSWVEGKLIDKVGQLGKKLHTGRSRNDQVATDLKLWCKETVRELLTANRQLQSALVETAQANQDAVMPGYTHLQRAQPVTFAHWCLAYVEMLARDESRLQDTLKRLDVSPLGCGALAGTAYEIDREQLAGWLGFTSATRNSLDSVSDRDHVLELLSDAAIGMVHLSRFAEDLIFFNSGEAGFVELSDRVTSGSSLMPQKKNPDALELIRGKCGRVQGALTGMMMTLKGLPLAYNKDMQEDKEGLFDALDTWLDCLHMAALVLDGIQVKRPRCQDAAQQGYANATELADYLVAKGVPFREAHHIVGEAVVEAIRQGKPLEALPLADLQKFSRVIGDDVYPILSLQSCLDKRAAKGGVSPLQVAQAINDAKARLAL

SEQ ID NO: 75079 - protein, 283 aa, Salmonella typhimurium
MATKLQDENTPCLAATPSEPRPTVLVFDSGVGGLSVYDEIRRLLPDLHYIYAFDNVAFPYGEKSETFIVERVVEIVTAVQQRYPLSLAVIACNTASTVSLPALREKFAFPVVGVVPAIKPAARLTANGVVGLLATRATVKRPYTHELIARFANECQIAMLGSAELVELAEAKLHGDSVSLEELRRILRPWLRMPEPPDTVVLGCTHFPLLRDELLQVLPEGTRLVDSGAAIARRTAWLLEHEAPDAKSTDANIAYCMAMTPGAEQLLPVLQRYGFETLEKLPV

SEQ ID NO: 75080 - protein, 342 aa, Salmonella typhimurium
MTHSLKPWNTFGIDHCAKHIVCAENEQQLLSAWQQATREGLPVMILGEGSNVLFLENYAGTVILNRLKGIEVNETADAWHLHVGAGENWHQLVRYALDNNMPGLENLALIPGCVGSSPIQNIGAYGVELQRVCDYVDCVELETGKRLRLSAAECRFGYRDSIFKNEYQDRVAIVAVGLRLSKQWQPVLTYGDLTCLDPKTVTAQQVFDAVCHMRTTKLPDPKVNGNAGSFFKNPVVAADIAMELLERFPNAPHYPQADGSVKLAAGWLIDQCQLKGVTIGGAAVHRQQALVLINANDATSKDVVALAHHVRQKVGEKFNVWLEPEVRFIGRSGEVNAVESIA

SEQ ID NO: 75081 - protein, 394 aa, Salmonella typhimurium
MSKEKFERTKPHVNVGTIGHVDHGKTTLTAAITTVLAKTYGGAARAFDQIDNAPEEKARGITINTSHVEYDTPTRHYAHVDCPGHADYVKNMITGAAQMDGAILVVAATDGPMPQTREHILLGRQVGVPYIIVFLNKCDMVDDEELLELVEMEVRELLSQYDFPGDDTPIVRGSALKALEGDAEWEAKIIELAGFLDSYIPEPERAIDKPFLLPIEDVFSISGRGTVVTGRVERGIIKVGEEVEIVGIKETQKSTCTGVEMFRKLLDEGRAGENVGVLLRGIKREEIERGQVLAKPGTIKPHTKFESEVYILSKDEGGRHTPFFKGYRPQFYFRTTDVTGTIELPEGVEMVMPGDNIKMVVTLIHPIAMDDGLRFAIREGGRTVGAGVVAKVLG

SEQ ID NO: 75082 - protein, 181 aa, Salmonella typhimurium
MSEAPKKRWYVVQAFSGFEGRVATSLREHIKLHNMEELFGEVMVPTEEVVEIRGGQRRKSERKFFPGYVLVQMVMNDASWHLVRSVPRVMGFIGGTSDRPAPISDKEVDAIMNRLQQVGDKPRPKTLFEPGEMVRVNDGPFADFNGVVEEVDYEKSRLKVSVSIFGRATPVELDFSQVEKA

SEQ ID NO: 75083 - protein, 257 aa, Salmonella typhimurium
MAHSWLRLVAGATLSFVIAGHALADEGKITVFAAASLTNAMQDIAAEYKKEKNVDVVSSFASSSTLARQIEAGAPADLFISADQKWMDYAADKKAVDTTTRETLLGNSLVVVAPKASEQKPFTIDNKTDWIRLLNGGRLAVGDPQHVPAGIYAKEALQKLGAWQTLEPKLAPGEDVRGALALVERNEAPLGIVYGSDAVASKGVNVVATFPEDSHKKVEYPIAIVEGHKNATVSAFYDYLKGPQASAIFKRYGFTTK

SEQ ID NO: 75084 - protein, 352 aa, Salmonella typhimurium
MLELNFSQTLGTHCLTLNETLPASGITAIFGVSGAGKTSLINAISGLTRPQKGRIALNGRVLHDAENGICLTPEKRRIGYVFQDARLFPHYKVRGNLRYGMAKSMTGQFDKLVSLLGIEALLDRLPGSLSGGEKQRVAIGRALLTAPELLLLDEPLASLDIPRKRELLPYLQRLAREINIPMLYVSHSLDEILHLADKVMVLEDGQVKAFGPLEEVWGSSVMHPWLPKEQQSSILKVSVLEHHPHYAMTALALGDQHLWVNKLNQPLQSTLRIRIQASDVSLVLQPPQQTSIRNVLRAKVANCYDDNGQVEVQLEIGGRTLWARISPWARDELNIKPGLWLYAQVKSVSITA

SEQ ID NO: 75085 - protein, 142 aa, Salmonella typhimurium; identical to SEQ ID NO: 42994

SEQ ID NO: 75086 - protein, 234 aa, Salmonella typhimurium
MAKLTKRMRVIREKVDATKQYDINEAIALLKELATAKFNESVDVAVNLGIDARKSDQNVRGATVLPHGTGRSVRVAVFTQGPNAEAAKAAGAELVGMEDLADQIKKGEMNFDVVIASPDAMRVVGQLGQVLGPRGLMPNPKVGTVTPNVAEAVKNAKAGQVRYRNDKNGIIHTTIGKVDFDADKLKENLEALLVALKKAKPSQAKGVYIKKVSISTTMGAGVAVDQAGLSASAN

SEQ ID NO: 75087 - protein, 165 aa, Salmonella typhimurium; identical to SEQ ID NO: 60065

SEQ ID NO: 75088 - protein, 1342 aa, Salmonella typhimurium
MVYSYTEKKRIRKDFGKRPQVLDVPYLLSIQLDSFQKFIEQDPEGQYGLEAAFRSVFPIQSYSGNSELQYVSYRLGEPVFDVQECQIRGVTYSAPLRVKLRLVIYEREAPEGTVKDIKEQEVYMGEIPLMTDNGTFVINGTERVIVSQLHRSPGVFFDSDKGKTHSSGKVLYNARIIPYRGSWLDFEFDPKDNLFVRIDRRRKLPATIILRALNYTTEQILDLFFEKVVFEIRDNKLQMELIPERLRGETASFDIEANGKVYVEKGRRITARHIRQLEKDDIKHIEVPVEYIAGKVVSKDYVDESTGELICAANMELSLDLLAKLSQSGHKRIETLFTNDLDHGPYISETVRVDPTNDRLSALVEIYRMMRPGEPPTREAAESLFENLFFSEDRYDLSAVGRMKFNRSLLRDEIEGSGILSKDDIIDVMKKLIDIRNGKGEVDDIDHLGNRRIRSVGEMAENQFRVGLVRVERAVKERLSLGDLDTLMPQDMINAKPISAAVKEFFGSSQLSQFMDQNNPLSEITHKRRISALGPGGLTRERAGFEVRDVHPTHYGRVCPIETPEGPNIGLINSLSVYAQTNEYGFLETPYRRVVDGVVTDEIHYLSAIEEGNYVIAQANSNLDDEGHFVEDLVTCRSKGESSLFSRDQVDYMDVSTQQVVSVGASLIPFLEHDDANRALMGANMQRQAVPTLRADKPLVGTGMERAVAVDSGVTAVAKRGGTVQYVDASRIVIKVNEDEMYPGEAGIDIYNLTKYTRSNQNTCINQMPCVSLGEPVERGDVLADGPSTDLGELALGQNMRVAFMPWNGYNFEDSILVSERVVQEDRFTTIHIQELACVSRDTKLGPEEITADIPNVGEAALSKLDESGIVYIGAEVTGGDILVGKVTPKGETQLTPEEKLLRAIFGEKASDVKDSSLRVPNGVSGTVIDVQVFTRDGVEKDKRALEIEEMQLKQAKKDLSEELQILEAGLFSRIRAVLVSSGVEAEKLDKLPRDRWLELGLTDEEKQNQLEQLAEQYDELKHEFEKKLEAKRRKITQGDDLAPGVLKIVKVYLAVKRRIQPGDKMAGRHGNKGVISKINPIEDMPYDENGTPVDIVLNPLGVPSRMNIGQILETHLGMAAKGIGDKINAMLKQQQEVAKLREFIQRAYDLGADVRQKVDLSTFSDDEVLRLAENLRKGMPIATPVFDGAKEAEIKELLKLGDLPTSGQITLFDGRTGEQFERPVTVGYMYMLKLNHLVDDKMHARSTGSYSLVTQQPLGGKAQFGGQRFGEMEVWALEAYGAAYTLQEMLTVKSDDVNGRTKMYKNIVDGNHQMEPGMPESFNVLLKEIRSLGINIELEDE

SEQ ID NO: 75089 - protein, 1407 aa, Salmonella typhimurium
VKDLLKFLKAQTKTEEFDAIKIALASPDMIRSWSFGEVKKPETINYRTFKPERDGLFCARIFGPVKDYECLCGKYKRLKHRGVICEKCGVEVTQTKVRRERMGHIELASPTAHIWFLKSLPSRIGLLLDMPLRDIERVLYFESYVVIEGGMTNLERQQILTEEQYLDALEEFGDEFDAKMGAEAIQALLKSMDLEQECETLREELNETNSETKRKKLTKRIKLLEAFVQSGNKPEWMILTVLPVLPPDLRPLVPLDGGRFATSDLNDLYRRVINRNNRLKRLLDLAAPDIIVRNEKRMLQEAVDALLDNGRRGRAITGSNKRPLKSLADMIKGKQGRFRQNLLGKRVDYSGRSVITVGPYLRLHQCGLPKKMALELFKPFIYGKLELRGLATTIKAAKKMVEREEAVVWDILDEVIREHPVLLNRAPTLHRLGIQAFEPVLIEGKAIQLHPLVCAAYNADFDGDQMAVHVPLTLEAQLEARALMMSTNNILSPANGEPIIVPSQDVVLGLYYMTRDCVNAKGEGMVLTGPKEAERIYRAGLASLHARVKVRITEYEKDENGEFVAHTSLKDTTVGRAILWMIVPKGLPFSIVNQALGKKAISKMLNTCYRILGLKPTVIFADQTMYTGFAYAARSGASVGIDDMVIPEKKHEIISEAEAEVAEIQEQFQSGLVTAGERYNKVIDIWAAANDRVSKAMMDNLQTETVINRDGQEEQQVSFNSIYMMADSGARGSAAQIRQLAGMRGLMAKPDGSIIETPITANFREGLNVLQYFISTHGARKGLADTALKTANSGYLTRRLVDVAQDLVVTEDDCGTHEGILMTPVIEGGDVKEPLRDRVLGRVTAEDVLKPGTADILVPRNTLLHEQWCDLLEANSVDAVKVRSVVSCDTDFGVCAHCYGRDLARGHIINKGEAIGVIAAQSIGEPGTQLTMRTFHIGGAASRAAAESSIQVKNKGSIKLSNVKSVVNSSGKLVITSRNTELKLIDEFGRTKESYKVPYGAVMAKGDGEQVAGGETVANWDPHTMPVITEVSGFIRFTDMIDGQTITRQTDELTGLSSLVVLDSAERTTGGKDLRPALKIVDAQGNDVLIPGTDMPAQYFLPGKAIVQLEDGVQISSGDTLARIPQESGGTKDITGGLPRVADLFEARRPKEPAILAEIAGIVSFGKETKGKRRLVITPVDGSDPYEEMIPKWRQLNVFEGERVERGDVISDGPEAPHDILRLRGVHAVTRYIVNEVQDVYRLQGVKINDKHIEVIVRQMLRKATIESAGSSDFLEGEQVEYSRVKIANRELEANGKVGATFSRDLLGITKASLATESFISAASFQETTRVLTEAAVAGKRDELRGLKENVIVGRLIPAGTGYAYHQDRMRRRAAGEQPATPQVTAEDASASLAELLNAGLGGSDNE

SEQ ID NO: 75090 - protein, 313 aa, Salmonella typhimurium
MTQWYPASPALWQGRDDSIEAPDARRLFQTVTRSETFSPENWQQKIALMGFACDEGVKRNAGRPGAAGAPDALRKALANMASHQGHERLVDLGNWVAPTPDLEGAQQALRDAVSRCLRAGMRTLVLGGGHETAFGHGAGVLDAFAQESVGIINLDAHLDLRQTDRATSGTPFRQLAQLCDAQSRAFHYACFGVSRAANTQALWREAQWRNVTVVEDLDCHDALAQMAQFIDKVDKIYLTIDLDVLPVWEMPAVSAPAALGVPLIQVLRLIEPVCRSGKLQAADLVEFNPRFDEDGAAARVAARLGWQIAHWWR

SEQ ID NO: 75091 - protein, 241 aa, Salmonella typhimurium
MYSSRSRSAPAPFYETVKQDICKKIAGGVWQPHDRIPSEAELVAQYGFSRMTINRALRELTDEGWLVRLQGVGTFVAEPKGQSALFEVRSIAEEIAARRHQHRCEVLTLERVRANAIQASALNVNESDVIFHSIMVHYENDLPVQIEDRCVNADIAVDYLTQDYSQTTPHAYLSRIAPLTEGEHIVEAVRATAQECAWLTIKEHEPCLLIRRTTWSASRIVSHARLLFPGSRYRLQGRFIS

SEQ ID NO: 75092 - protein, 506 aa, Salmonella typhimurium
MNTMTLTPGQLSLSQLYDIWRHPVQLRLDASAIDGINASVACVNDIVAEGRTAYGINTGFGLLAQTRIADEDLQNLQRSLVLSHAAGVGDPLDDAMVRLIMVLKINSLARGFSGIRLSVIEALIALVNAGVYPLIPAKGSVGASGDLAPLAHLSLTLLGEGKARWQGEWLPAQTALKKAGLEPVALAAKEGLALLNGTQASTAFALRGLFEAQELFASAVVCGALTTEAVLGSRRPFDARIHAARGQQGQIDVARLFRHLLTDTSAIAESHHHCHKVQDPYSLRCQPQVMGACLTQLRQTKEVLLAEANAVSDNPLVFADAGEVISGGNFHAEPVAMAADNLALAIAEIGALSERRIALMMDKHMSQLPPFLVKNGGVNSGFMIAQVTAAALASENKALAHPHSVDSLPTSANQEDHVSMAPAAGRRLWEMAANTRGIIAVEWLAACQGIDLREGLTSSPLLEQARQTLREQVAHYTQDRFFAPDIECATALLAQGALQRLVPDFM

SEQ ID NO: 75093 - protein, 346 aa, Salmonella typhimurium
MARHPRWTLSQVTELFEKPLLELLFEAQQIHRQHFDPQQVQVSTLLSIKTGACPEDCKYCPQSSRYKTGLEAERLMEVEQVLDSARKAKNAGSTRFCMGAAWRNPHERDMPYLEKIVQGVKAMGLETCMTLGMLNESQAQRLANAGLDYYNHNLDTSPEFYGNIITTRTYQERLDTLEKVREAGIKVCSGGIVGLGETVTDRAGLLLQLANLPTPPESVPINMLVKVKGTPLADNDDVDAFDFIRTIAVARIMMPTSYVRLSAGREQMNEQTQAMCFMAGANSIFYGCKLLTTPNPAEDKDLQLFRKLGLNPQQTRVLAGDNEQQQRLEQTLMTPDTDDYYNAAAL

SEQ ID NO: 75094 - protein, 385 aa, Salmonella typhimurium
MSWQQRVDDALTARRVTDTLRRRYVVSQGAGRWLVANGRQYLNFSSNDYLGLSQHPQIIRAWQQAATRFGVGSGGSGHISGYSVAHQALEEELAQWLGYPRALLFISGFAANQAVITALMKKNDRIVADRLSHASLLEAANLSPAQLRRFIHNDTQHLSRLLQSPCVGQQLVVTEGVYSMDGDSAPLAEIQHIARRHHAWLLVDDAHGIGVTGDEGRGTCWLRGVKPELLVVTFGKGFGVSGAAVLCSESVADYLLQFARHLVYSTSMPPAQAQALSASLAVIRSDEGGERREKLAALVQRFRAGVNASRFTLLNAHSAIQPLIVGDNSRALRLAEALRQQGCWATAIRPPTVPVGTARLRLTLTQAHEACDIDRLLEVLHGAGE

SEQ ID NO: 75095 - protein, 434 aa, Salmonella typhimurium
MKTRTQQIEELQKEWTQPRWEGITRPYSAEEVVKLRGSVNPECTLAQLGAAKMWRLLHGEAKKGYINSLGALTGGQALQQAKAGIEAIYLSGWQVAADANLASSMYPDQSLYPANSVPAVVDRINNTFRRADQIQWASGIEPNDPRYVDYFLPIVADAEAGFGGVLNAFELMKSMIEAGAAAVHFEDQLASVKKCGHMGGKVLVPTQEAIQKLVAARLAADVMGVPTLVIARTDADAADLITSDCDPYDSGFITGERTSEGFYRTHAGIEQAISRGLAYAPYADLVWCETSTPDLELARRFADAIHAKYPGKLLAYNCSPSFNWQKNLDDKTIASFQQQLSDMGYKYQFITLAGIHSMWFNMFDLAHAYAQGEGMKHYVEKVQQPEFAAAKDGYTFVSHQQEVGTGYFDKVTTIIQGGASSVTALTGSTEEAQF

SEQ ID NO: 75096 - protein, 1256 aa, Salmonella typhimurium
MSHVARCSLFRQHALCQYGSLRGALSGASVSSKVEQLRAQLNERILVLDGGMGTMIQSYRLHEEDFRGERFADWPCDLKGNNDLLVLSKPEVIAAIHNAYFEAGADIIETNTFNSTTIAMADYRMESLSAEINYAAAKLARACADEWTARTPEKPRFVAGVLGPTNRTASISPDVNDPAFRNITFDQLVAAYRESTKALVEGGADLILIETVFDTLNAKAAVFAVKEEFEALGVDLPIMISGTITDASGRTLSGQTTEAFYNSLRHAEALTFGLNCALGPDELRQYVQELSRIAECYVTAHPNAGLPNAFGEYDLDADTMAKQIREWAEAGFLNIVGGCCGTTPEHIAAMSRAVAGLLPRQLPDIPVACRLSGLEPLNIGDDSLFVNVGERTNVTGSAKFKRLIKEEKYSEALDVARQQVESGAQIIDINMDEGMLDAEAAMVRFLSLIAGEPDIARVPIMIDSSKWEVIEKGLKCIQGKGIVNSISMKEGVEAFIHHAKLLRRYGAAVVVMAFDEQGQADTRARKIEICRRAYKILTEEVGFPPEDIIFDPNIFAVATGIEEHNNYAQDFIGACEDIKRELPHALISGGVSNVSFSFRGNDPVREAIHAVFLYYAIRNGMDMGIVNAGQLAIYDDLPAELRDAVEDVILNRRDDGTERLLDLAEKYRGSKTDEAANAQQAEWRSWDVKKRLEYSLVKGITEFIEQDTEEARQQAARPIEVIEGPLMDGMNVVGDLFGEGKMFLPQVVKSARVMKQAVAYLEPFIEASKEKGSSNGKMVIATVKGDVHDIGKNIVGVVLQCNNYEIVDLGVMVPAEKILRTAREVNADLIGLSGLITPSLDEMVNVAKEMERQGFTIPLLIGGATTSKAHTAVKIEQNYSGPTVYVQNASRTVGVVAALLSDTQRDDFVARTRKEYETVRIQHARKKPRTPPVTLEAARDNDLAFDWERYTPPVAHRLGVQEVEASIETLRNYIDWTPFFMTWSLAGKYPRILEDEVVGVEAQRLFKDANDMLDKLSAEKLLNPRGVVGLFPANRVGDDIEIYRDETRTHVLTVSHHLRQQTEKVGFANYCLADFVAPKLSGKADYIGAFAVTGGLEEDALADAFEAQHDDYNKIMVKAIADRLAEAFAEYLHERVRKVYWGYAPNESLSNDELIRENYQGIRPAPGYPACPEHTEKGTIWQLLDVEKHTGMKLTESFAMWPGASVSGWYFSHPESKYFAVAQIQRDQVTDYAFRKGMSVEDVERWLAPNLGYDAD

SEQ ID NO: 75097 - protein, 454 aa, Salmonella typhimurium
MSFDSLGLNPDILRAIAEQGYREPTPIQQQAIPAVLEGRDLMASAQTGTGKTAGFTLPLLQHLITHQPHAKGRRPVRALILTPTRELAAQIGENVRDYSKYLNIRSLVVFGGVSINPQMMKLRGGVDVLVATPGRLLDLEHQNAVKLDQIEILVLDEADRMLDMGFIHDIRRVLAKLPAKRQNLLFSATFSDDIKALAEKLLRNPLEIEVARRNTASEQVTQHVHFVDKKRKRELLSQMIGQGNWQQVLVFTRTKHGANHLAEQLNKDGIRSAAIHGNKSQGARTRALADFKSGDIRVLVATDIAARGLDIEELPHVVNYELPNVPEDYVHRIGRTGRAAATGEALSLVCVDEHKLLRDIEKLLKKEIPRITTPGYEPDPSIKAEPIQNGRQQRGGGGGRGRGQNQGGAGRSQQPRRQDSGAAKAKPKPRTGEGKTAGDKARPPRRPRRITPAQ

SEQ ID NO: 75098 - protein, 710 aa, Salmonella typhimurium
LNRRFARRQRIRRRAADGGGQNLIRLHRRAHISQIKMLFHLAIKGKTHRPLLERRGERHASKRRVRTDNTGERGFADNQPANILRLHQRRYRVFQRLIRFIRILMAIHVIVGDNRADTAHKVGESGDRGPRDNMVCPGILPHADGTNRHSFDRPRQRAYGDVAGIHPVFKLNKDAGDNIFHQGLRTERDSQTRARASQQWRDIDADFRHDHDGYGTDNHCQRIAEQRQQRARAGAGRAAMNIGGQTILNQTGEDRPSHGGEEDRDTDKDIDHLFPRAIMPVPEIEPPGVEQQHNGDADGQKACDFRRGEPAVKPLLFRVIALRMGRQGDGFRYPAGKHTGDKRRDANNRQTAHGRAHHKLQAIAWVEREEKQHDKVSAGQPVPHQRKGADKQAKKGSFRQTMLRNLRFVFKDQVQRPDGDAEHDRHISHRANLNIHLVGNNRNGNNPVANQTAKGTHTAIPVTRCRILNREWAFRYIRAKNKPQNRFKELYREGIQEQALLKSDSSTSRMEIITEHLTDKGERQQEVDNKRADDHRRELPVAAFTVFLACPQAHFSIRQGAKPYHAIKTKYRDGQKKVGRVGEGLRVKRLVRRIGDVAIKLGETGSESIAVLTGNGGDVLQYRFLIFGRRRRKRWRWLGRRRGGFAELRYQFVTSLVLQYVSQGRIGRFFLFRTGLWRCLLAGCPRGHAGYGDRMGRCAQTKKDEQGPPH

SEQ ID NO: 75099 - protein, 635 aa, Salmonella typhimurium
MSLISMHGAWLSFSDAPLLDNAELHIEDNERVCLVGRNGAGKSTLMKILNREQGLDDGRIIYEQDLIVARLQQDPPRNIAGSVYDFVAEGIEEQAEYLKRYHEISRLVMTDPSEKNLNEMARVQEQLDHHNLWQLENRINEVLAQLGLDPNAALSSLSGGWLRKAALGRALVSNPRVLLLDEPTNHLDIETIDWLEGFLKTFNGTIIFISHDRSFIRNMATRIVDLDRGKLVTYPGNYDQYLLEKEEALRVEELQNAEFDRKLAQEEVWIRQGIKARRTRNEGRVRALKAMRRERSERREVMGTAKMQVEEATRSGKIVFEMENVDYQVEGKQLVKDFSAQVQRGDKIALIGPNGCGKTTLLKLMLGQLQADSGRIHVGTKLEVAYFDQHRAELDPEKTVMDNLAEGKQEVMVNGKPRHVLGYLQDFLFHPKRAMTPVRALSGGERNRLLLARLFLKPSNLLILDEPTNDLDVETLELLEELIDGYQGTVLLVSHDRQFVDNTVTECWIFEGGGKIGRYIGGYHDARAQQEQHLATKQPMAKKNEEVIAPKAEIVKRGSSKLSYKLQRELEQLPGQLEDLEAKLEALQAQVADAAFFSQPHEQTQKVLADLSQAEQELEQAFERWEYLEGLKNGA

SEQ ID NO: 75100 - protein, 543 aa, Salmonella typhimurium
VLTLLHLLSAVALLVWGTHIVRTGVMRVFGARLRTVLSRSVEKKPLAFCAGIGVTALVQSSNATTLLVTSFVAQDLVALTPALVIVLGADVGTALMARILTFDLSWLSPLLIFIGVIFFLGRKQSRAGQLGRVGIGLGLILLALELIVQAVTPITQANGVQVIFASLTGDIMLDALIGAMFAIISYSSLAAVLLTATLTAAGIISFPVALCLVIGANLGSGLLAMLNNSAANAAARRVALGSLLFKLIGSLVILPFVHPLANLMDELSLPKSELVIYFHVFYNLVRCLAMVPFAELMARFCKRIIRDEPELDTHLKPKHLDVSALDTPTLALANAAREVLRIGDAMEQMMEGLKKVMHGEPREEKALRKLADDVNVLYTAIKLYLARMPKDELAAEESRRWAEIIEMALNLEQASDIIERMGSEIADKSLAARRAFSEEGLKELDALYDQLLSNLQLAMSVFFSGDVTSARRLRRSKHRFRILNRRYSHAHVDRLHQQNVQSIETSSLHLGLLGDMKRLNSLFCSVAYSVLEQPDQDEERGEY

SEQ ID NO: 75101 - protein, 289 aa, Salmonella typhimurium
MLTDTSTRLNKYISESGICSRREADRFIEQGNVFINGKRAAIGDQVVAGDIVKVNGRLIEPREADDLVLIALNKPVGIVSTTEDGERDNIVDFVNHSKRIFPIGRLDKDSQGLIFLTNHGDLVNKILRAGNDHEKEYLVTVDKPITDEFIRGMGAGVPILGTVTKKCKVKKEAPFVFRITLVQGLNRQIRRMCEYFGYEVTKLERTRIMNVSLSGIPLGEWRDLTDDELIDLFKLIERSSSEAKPKAKAKPKTTGIKRPVVAIEKSNEKARPTSSGKRFTSPGRKKKGR

SEQ ID NO: 75102 - protein, 530 aa, Salmonella typhimurium
VLVSSNVTMQFGSKPLFENISVKFGGGNRYGLIGANGSGKSTFMKILGGDLEPTLGNVSLDPNERIGKLRQDQFAFETFTVLDTVIMGHGELWEVKQERDRIYALPEMSEEDGYKVADLEVKYGEMDGYSAEARAGELLLGVGIPLEQHYGLMSEVAPGWKLRVLLAQALFSNPDILLLDEPTNNLDIDTIRWLEQVLNERDSTMIIISHDRHFLNMVCTHMADLDYGDLRVYPGNYDEYMTAATQARERLLADNAKKKAQIAELQSFVSRFSANASKSRQATSRARQIDKIKLEEVKASSRQNPFIRFEQDKKLFRNALEVEALTKGFDNGPLFKNVNLLLEVGEKLAVLGTNGVGKSTLLKTLVGDLDADHGTVKWSENARIGYYAQDHEYEFENDLTVFEWMSQWKQEGDDEQAVRSILGRLLFSQDDIKKPAKVLSGGEKGRMLFGKLMMQKPNILIMDEPTNHLDMESIESLNMALELYQGTLIFVSHDREFVSSLATRVIEITPERVVDFSGNYDDYLRSKGIE

SEQ ID NO: 75103 - protein, 269 aa, Salmonella typhimurium; identical to SEQ ID NO: 72756

SEQ ID NO: 75104 - protein, 623 aa, Salmonella typhimurium
VPHSDELDSRDVLSVSGLNIAFHHEGQQVDAVRNVSLRLKRGETLAIVGESGSGKSVTALALMRLIEQSGANVRCGEMLLRRRNRQVIELSEQSDAQMRRVRGADIAMIFQEPMTSLNPVFTVGEQIAESIRLHQGASHEEALAEAKRMLDQVRIPESQAILSRYPHQLSGGMRQRVMIAMALSCRPAVLIADEPTTALDVTIQAQILQLIKVLQQEMSMGVIFITHDMGVVADIADRVLVMYQGEAVETGSVEQIFHAPTHPYTQTLLAAVPQLGAMRGHSLPRRFPLISADEPALYESQIEQDTVVEGEPILQVRGLVTRFPLRSGLFNRVTREVHAVENISFDLWPGETLSLVGESGSGKSTTGRALLRLVESRQGEIIFNGQRIDTLSAGKLQPLRRDIQCIFQDPYASLDPRQTVGYSIMEPLRIHGLGQGDAAAKRVAWLLERVGLRPEHAWRYPHEFSGGQRQRICIARALALNPKVIIADEAVSALDVSVRGQIINLLLDLQREMGIAYLFISHDMAVVERISHRVAVMYLGQIVEMGPRRAVFENPQHPYTRKLMAAVPVADPSRHRPRRVLLSDDIPSNIHKRGEETPAVSLQLVGPGHYVARPLQDNALSRL

SEQ ID NO: 75105 - protein, 259 aa, Salmonella typhimurium
MHIRHQDLTTAEVRSSHLHRLHRVTLFSAAICHITQGSKVIIQDDSRLVAGPGELIIIPANTPLEIINQPAQNGFRSDLLLLSPEIIARFKTMYVQDYPPANLTSLCTPMSRSLTFMWENVLDAVRQGLPVGLQEHQAMGLLLALLHDGAAGPLLIERRYTLTEQVRQLIMLSPAKLWTAQEIARRLAMGTSTLRRRLQRESQSYRQIVEEVRMSCALSQLQSTTLPIGEIALRCGYLSGSRFTARFRQHYGCLPSQVR

SEQ ID NO: 75106 - protein, 303 aa, Salmonella typhimurium
MRLFNWRRQAILHAMPVVKPDQIRTPWREFWRRFRRQHVALVAGGFVLALILVAIFARWLTPYDAENYFDYDSLNNGPSLQHWFGVDSLGRDIFSRVLVGAQISLAAGVFAVFIGAIIGTVLGLLAGYYEGWWDRFIMRICDVLFAFPGILLAIAVVAVLGSGIANVIVAVAIFSIPAFARLVRGNTLVLKQQTFIESARSIGASDTTILFSHILPGTVSSIVVFFTMRIGTSIISAASLSFLGLGAQPPTPEWGAMLNEARADMVIAPHVALFPAVAIFLTVLAFNLLGDGLRDALDPKIKG

SEQ ID NO: 75107 - protein, 429 aa, Salmonella typhimurium
MKGTVFAVALNHRSQLDAWREAFSQPPYNAPPKTAVWFIKPRNTVIRHGEPIPYPQGEKVLSGATVALIVGKTASRIRPEAAADYIAGYALANEVSLPEESFYRPAIKAKCRDGFCPLGEMAPLSDVDNLTIITEINGREADHWNTADLQRSAAQLLSALSEFATLNPGDAILLGTPQNRVALRPGDRVRILAKGLPALENPVVAEDEFARHQTFTWPLSATGTLFALGLNYADHASELAFTPPKEPLVFIKAPNTFTEHHQTSVRPNNVEYMHYEAELVVVIGKTARKVSEAEAMEYVAGYTVCNDYAIRDYLENYYRPNLRVKSRDGLTPIGPWIVDKEAVSDPHNLTLRTFVNGELRQEGTTADLIFSIPFLISYLSEFMTLQPGDMIATGTPKGLSDVVPGDEVVVEVEGVGRLVNRIVSEESAK

SEQ ID NO: 75108 - protein, 488 aa, Salmonella typhimurium
MKKINHWINGKNVAGNDYFQTTNPATGDVLAEVASGGEAEVNQAVAAAKEAFPKWANLPMKERARLMRRLGDLIDQHVPEIAAMETADTGLPIHQTKNVLIPRASHNFEFFAEVCQQMNGKTYPVDDKMLNYTLVQPVGVCALVSPWNVPFMTATWKVAPCLALGNTAVLKMSELSPLTADRLGELALEAGIPAGVLNVVQGYGATAGDALVRHHDVRAVSFTGGTATGRNIMKNAGLKKYSMELGGKSPVLIFEDADIERALDAALFTIFSINGERCTAGSRIFIQQSIYPEFVKRFAERANRLRVGDPTDPNTQVGALISQQHWEKVSGYIRLGIEEGATLLAGGAEKPTDLPAHLKGGNFLRPTVLADVDNRMRVAQEEIFGPVACLLPFKDEAEGLRLANDVEYGLASYIWTQDVSKVLRLARGIEAGMVFVNTQNVRDLRQPFGGVKASGTGREGGEYSFEVFAEMKNVCISMGDHPIPKWGV

SEQ ID NO: 75109 - protein, 283 aa, Salmonella typhimurium
MGKLALAAKITHVPSMYLSELPGKNHGCRQAAIDGHIEIGKRCREMGVDTIIVFDTHWLVNSAYHINCADHFQGVYTSNELPHFIRDMTYDYDGNPELGHLIADEAVKLGVRAKAHNIPSLKLEYGTLVPMRYMNSDKHFKVVSISAFCTVHDFADSRRLGEAILKAIEKYDGTVAVFASGSLSHRFIDDQRAEEGMNSYTREFDHQMDERVVKLWREGKFKEFCTMLPEYADYCYGEGNMHDTVMLLGMLGWDKYDGKVEFITDLFASSGTGQVNAVFPLPA

SEQ ID NO: 75110 - protein, 126 aa, Salmonella typhimurium
MPHFIAECTENIREQADLPGLFSKVNEALAASGIFPIGGIRSRAHWLDTWQMADGKHDYAFVHMTLKIGAGRSLESRQEVGEMLFGLIKAHFADLMENRYLALSFEIAELHPTLNYKQNNVHALFK

SEQ ID NO: 75111 - protein, 263 aa, Salmonella typhimurium
MKNAFKDALKAGRPQIGLWLGLANSYSAELLAGAGFDWLLIDGEHAPNNVQTVLTQLQAIAPYPSQPVVRPSWNDPVQIKQLLDVGAQTLLIPMVQNADEARNAVAATRYPPAGIRGVGSALARASRWNRIPEYLHLANDAMCVLVQIETREAMSNLASILDVDGIDGVFIGPADLSADMGFAGNPQHPEVQAAIENAIVQIRAAGKAPGILMANEALAKRYLELGALFVAVGVDTTLLARGAEALAARFGVEKKLSGASGVY

SEQ ID NO: 75112 - protein, 207 aa, Salmonella typhimurium
MKYMIVLLLALFSTLSIAQETAPFTPDQEKQIENLIHAALFNDPASPRIGAKHPKLTLVNFTDYNCPYCKQLDPMLEKIVQKYPDVAVIIKPLPFKGESSVLAARIALTTWREHPQQFLALHEKLMQKRVYHTDDSIKQAQQKAGATPVTLDEKSMETIRTNLQLARLVGVQGTPATIIGDELIPGAVPWDTLEAVVKEKLASANGG

SEQ ID NO: 75113 - protein, 426 aa, Salmonella typhimurium
VIAKFFPWYSEITRPQKNALFSAWLGYVFDGFDFMLIFYIMYLIKADLGLTDMEGAFLATAAFIGRPFGGALFGLLADKFGRKPLMMWSIVAYSVGTGLSGLASGVIMLTLSRFIVGMGMAGEYACASTYAVESWPKHLKSKASAFLVSGFGIGNIIAAYFMPSFAEAYGWRAAFFVGLLPVLLVIYIRARAPESKEWEEAKLSGPGKHSQSAWSVFSLSMKGLFNRAQFPLTLCVFIVLFSIFGANWPIFGLLPTYLTGEGFDTGVVSNLMTAAAFGTVLGNIVWGLCADRIGLKKTFSIGLLMSFLFIFPLFRIPQDNYLLLGACLFGLMATNVGVGGLVPKFLYDYFPLEVRGLGTGLIYNLAATSGTFNSMAATWLGITMGLGAALTFIVAFWTATILLIIGLSIPDRLKARRESFQSTKEF

SEQ ID NO: 75114 - protein, 245 aa, Salmonella typhimurium
MYPVDLHMHTVASTHAYSTLSDYIAEAKRKGIKLFAITDHGPDMEDAPHHWHFINMRIWPRLVDGVGILRGIEANIKNINGEIDCSGKMFDSLDLIIAGFHEPVFAPHDKETNTQAMIATIASGKVHIISHPGNPKYPVEVKAIAQAAAKHHVALEINNSSFLHSRKGSEDNCRAVAAAVRDAGGWVALGSDSHTAFTLGDFTECRKILDAVNFPEDRILNVSPQRLLAFLESRGMAPVPEFAEL

SEQ ID NO: 75115 - protein, 179 aa, Salmonella typhimurium
MTSRLQVIQGDITQLSVDAIVNAANASLMGGGGVDGAIHRAAGPALLDACKLIRQQQGECQTGHAVITPAGKLSAKAVIHTVGPVWRGGEHQEAELLEEAYRNCLLLAEANHFRSIAFPAISTGVYGYPRAQAAEVAVRTVSDFITRYALPEQVYFVCYDEETARLYARLLTQQGDDPA

SEQ ID NO: 75116 - protein, 847 aa, Salmonella typhimurium
MNKTTEYIDALLLSEREKAALPKTDIRAVHQALDAEHRTYSREDDSPQGSVKARLEHAWPDSLAKGQLIKDDEGRDQLQAMPKATRSSMFPDPWRTNPVGRFWDRLRGRDVTPRYVSRLTKEEQASEQKWRTVGTIRRYILLILTLAQTVVATWYMKTILPYQGWALINPMDMVGQDIWVSFMQLLPYMLQTGILILFAVLFCWVSAGFWTALMGFLQLLIGRDKYSISASTVGDEPLNPEHRTALIMPICNEDVSRVFAGLRATWESVKATGNAAHFDVYILSDSYNPDICVAEQKAWMELIAEVQGEGQIFYRRRRRRMKRKSGNIDDFCRRWGNQYSYMVVLDADSVMSGECLSGLVRLMEANPNAGIIQSSPKASGMDTLYARCQQFATRVYGPLFTAGLHFWQLGESHYWGHNAIIRVKPFIEHCALAPLPGEGSFAGSILSHDFVEAALMRRAGWGVWIAYDLPGSYEELPPNLLDELKRDRRWCHGNLMNFRLFLVKGMHPVHRAVFLTGVMSYLSAPLWFMFLALSTALQVVHALTEPQYFLQPRQLFPVWPQWRPELAIALFASTMVLLFLPKLLSIMLIWCKGTKEYGGFWRVTLSLLLEVLFSVLLAPVRMLFHTVFVVSAFLGWEVVWNSPQRDDDSTPWGEAFMRHGSQLLLGLVWAVGMAWLDLRFLFWLAPIVFSLILSPFVSVISSRSTVGLRTKRWKLFLIPEEYSPPQVLVDTDKYLEMNRRRILDDGFMHAVFNPSLNALATAMATARHRASKVLEIARDRHVEQALNETPEKLNRDRRLVLLSDPVTMARLHYRVWNAPERYSSWVNHYQSLVLNPQALQGRTSSAR

SEQ ID NO: 75117 - protein, 350 aa, Salmonella typhimurium
MPVLHNRISNDELKAKMLAESEPRTTISFYKYFTIASPQQTRDALYQVFTALDVFGRVYLAHEGINAQISVPQSKLETFRQQLYTFDPALDGVRLNIALEDDGKSFWVLRMKVRDRIVADGIDDPTFDASNVGDYLKAADVNAMLDDPDAVFIDMRNHYEYEVGHFENALEIPADTFREQLPKAVEMLREHADKKIVMYCTGGIRCEKASAWMKHNGFNKVWHIEGGIIEYARRARAQGLPVRFIGKNFVFDERMGERISDEVIAHCHQCGASCDSHTNCKNDGCHLLFIQCPQCASKFNGCCSEQCCEELALPEEEQRRRRAGRENGNKIFNKSRGRLNSKLSIPDPAE

SEQ ID NO: 75118 - protein, 199 aa, Salmonella typhimurium
VRLTAKQITWLKVCLHLAGFLPLLWLFWAINHGGLSADPVKDIQHFTGRTALKFLLATLLVSPLARYAKQPLLIRTRRLLGLWCFVWATLHLTSYALLELGIHNLALLGSELISRPYLTLGIISWLVLLALTLTSTQFAQRKLGKRWQTLHNVVYLVAILAPIHYLWSVKILSPQPVIYAALALALLALRYRKFRQWWR

SEQ ID NO: 75119 - protein, 156 aa, Salmonella typhimurium
MDIRKIKKLIELVEESGISELEISEGEESVRISRTTANAGFPVMQQAYAAPMMQQPALSNAVAPAATPAMEAPAAAEISGHIVRSPMVGTFYRTPSPDAKAFIEVGQKVNVGDTLCIVEAMKMMNQIEADKAGTVKAILVESGQPVEFDEPLVVIE

SEQ ID NO: 75120 - protein, 449 aa, Salmonella typhimurium
MLDKIVIANRGEIALRILRACKELGIKTVAVHSSADRDLKHVLLADETVCIGPAPSVKSYLNIPAIISAAEITGAVAIHPGYGFLSENANFAEQVERSGFIFIGPKADTIRLMGDKVSAITAMKKAGVPTVPGSDGPLGDDMNANRAHAKRIGYPVIIKASGGGGGRGMRVVRSDAELAQSISMTKAEAKAAFSNDMVYMEKYLENPRHIEIQVLADGQGNAIYLAERDCSMQRRHQKVVEEAPAPGITPELRRYIGERCAKACVDIGYRGAGTFEFLFENGEFYFIEMNTRIQVEHPVTEMITGVDLIKEQLRIAAGQPLSITQDEVVVRGHAVECRINAEDPNTFLPSPGKITRFHAPGGFGVRWESHIYAGYTVPPYYDSMIGKLICYGENRDVAIARMKNALQELIIDGIKTNIDLQTRIMNDEHFQHGGTNIHYLEKKLGLQEK

SEQ ID NO: 75121 - protein, 483 aa, Salmonella typhimurium
MQLEVILPLVAYLVVVFGVSIYAMRKRTAGTFLNEYFLGSRSMGGIVLAMTLTATYISASSFIGGPGAAYKYGLGWVLLAMIQLPAVWLSLGILGKKFAILARRYNAVTLNDMLFARYQSRLLVWLASLSLLVAFIGAMTVQFIGGARLLETAAGIPYETGLLIFGVSIALYTAFGGFRASVLNDTLQGLVMLVGTIVLLVGVIHAAGGLSQAVDTLHALDPKLVTPQGADDILSPAFMTSFWVLVCFGVIGLPHTAVRCISYKDSKAVHRGIIIGTIVVAILMFGMHLAGALGRAVLPDLTVPDLVIPTLMVKVLPPFAAGIFLAAPMAAIMSTINAQLLQSSATIIKDLYLNLRPDQMQNEIRLKRMSAAITLLLGALLLLAAWKPPEMIIWLNLLAFGGLEAVFLWPLVLGLYWERANAAGALSAMIVGGVLYALLATFNIQYLGFHPIVPALLLSLLAFLIGNRFGSSASQATVLSTDK

SEQ ID NO: 75122 - protein, 385 aa, Salmonella typhimurium
MTKHARFSLLPSFIIFSAALLAGCNDQGDTQAHAGEPQVTVHVVETAPLAVTTELPGRTSAFRIAEVRPQVSGIVLKRNFTEGSDVEAGQSLYQIDPATYQADYDSAKGELAKSEAAAAIAHLTVKRYVPLVGTKYISQQEYDQAIADARQADAAVVAAKAAVESARINLAYTKVTSPISGRIGKSNVTEGALVTNGQSTELATVQQLDPIYVDVTQSSNDFMRLKQSVEQGNLHKDSASSTVQLVMENGQVYPIKGTLQFSDVTVDESTGSITLRAVFPNPQHSLLPGMFVRARIDEGVQPNAILVPQQGVTRTPRGDAMVMVVNDKSQVEARNVVAAQAIGDKWLISEGLKPGDKVIVSGLQKARPGVQVKATTDAPAAKTAQ

SEQ ID NO: 75123 - protein, 1037 aa, Salmonella typhimurium
MANFFIRRPIFAWVLAIILMMAGALAIMQLPVAQYPTIAPPAVSISATYPGADAQTVQDTVTQVIEQNMNGIDNLMYMSSTSDSAGSVTITLTFQSGTDPDIAQVQVQNKLQLATPLLPQEVQQQGISVEKSSSSFLMVAGFVSDNPNTTQDDISDYVASNIKDSISRLNGVGDVQLFGAQYAMRIWLDANLLNKYQLTPVDVINQLKVQNDQIAAGQLGGTPALPGQQLNASIIAQTRLKDPEEFGKVTLRVNTDGSVVHLKDVARIELGGENYNVVARINGKPASGLGIKLATGANALDTATAIKVKLAELQPFFPQGMKVVYPYDTTPFVKISIHEVVKTLFEAIILVFLVMYLFLQNIRATLIPTIAVPVVLLGTFAVLAAFGYSINTLTMFGMVLAIGLLVDDAIVVVENVERVMMEDNLSPREATEKSMSQIQGALVGIAMVLSAVFIPMAFFGGSTGAIYRQFSITIVSAMALSVLVALILTPALCATLLKPVSAEHHEKKSGFFGWFNTRFDHSVNHYTNSVSGIVRNTGRYLIIYLLIVVGMAVLFLRLPTSFLPEEDQGVFLTMIQLPSGATQERTQKVLDQVTHYYLNNEKANVESVFTVNGFSFSGQGQNSGMAFVSLKPWEERNGEENSVEAVIARATRAFSQIRDGLVFPFNMPAIVELGTATGFDFELIDQGGLGHDALTKARNQLLGMVAKHPDLLVRVRPNGLEDTPQFKLDVDQEKAQALGVSLSDINETISAALGGYYVNDFIDRGRVKKVYVQADAQFRMLPGDINNLYVRSANGEMVPFSTFSSARWIYGSPRLERYNGMPSMELLGEAAPGRSTGEAMSLMENLASQLPNGIGYDWTGMSYQERLSGNQAPALYAISLIVVFLCLAALYESWSIPFSVMLVVPLGVVGALLAASLRGLNNDVYFQVGLLTTIGLSAKNAILIVEFAKDLMEKEGRGLIEATLEASRMRLRPILMTSLAFILGVMPLVISRGAGSGAQNAVGTGVMGGMLTATLLAIFFVPVFFVVVKRRFNRHHD

SEQ ID NO: 75124 - protein, 429 aa, Salmonella typhimurium
MKKQNNLRSLAAQAVEQVVEQGQSLSNVLPPLQQKVADKDKALLQELCFGVLRTLSQLEWLINKLMSRPMTGKQRTVHYLIMVGFYQLLYTRVPPHAALAETVEGAVSIKRPQLKGLINGVLRQFQRQQETLLNEFATSDARFLHPGWLVKRLQNAYPTQWQHIIEANNQRPPMWLRVNRTHHTRDGWLGLLEDAGMKGYPHPDYPDAVRLETPAPVHALPGFAEGWVTVQDASAQGCAVFLAPQNGEHILDLCAAPGGKTTHILEVAPEADVLAVDIDEQRLSRVYDNLKRLGMKATVKQGDGRYPSQWCGEQQFDRILLDAPCSATGVIRRHPDIKWLRRDRDIAELAQLQAEILDAVWPRLKPGGTLVYATCSVLPEENRDQIKTFLQRTPDAALSETGTPDQPGQQNLPGGEEGDGFFYAKLIKK

SEQ ID NO: 75125 - protein, 458 aa, Salmonella typhimurium
MKIIILGAGQVGGTLAENLVGENNDITVVDTNGERLRSLQDKFDLRVVQGHGSHPRVLREAGADDADMLVAVTSSDETNMVACQVAYSLFNTPNRIARIRSPDYVRDADKLFHSEAVPIDHLIAPEQLVIDNIYRLIEYPGALQVVNFAEGKVSLAVVKAYYGGPLIGNALSTMREHMPHIDTRVAAIFRHDRPIRPQGSTIVEAGDEVFFIAASQHIRAVMSELQRLEKPYKRIMLVGGGNIGAGLARRLEKDYSVKLIERDQQRAAELAEKLQNTIVFFGDASDQELLAEEHIDQVDLFIAVTNDDEANIMSAMLAKRMGAKKVMVLIQRRAYVDLVQGSVIDIAISPQQATISALLSHVRKADIVGVSSLRRGVAEAIEAVAHGDESTSRVVGRVIDEIKLPPGTIIGAVVRGNDVMIANDNLRIEQGDHVIMFLTDKKFITDVERLFQPSPFFL

SEQ ID NO: 75126 - protein, 199 aa, Salmonella typhimurium
MKKHYSVQYETGDIVFTCIGAALFGQISTASQCWSNHVGIIIGHNGDDYLVAESRVPLSTVTTLSLFIQRSAGQRYAVRRLCGGLTVEQKLAIMEQVPARLNKFYHTGFKYESSRQFCSKFVFDIYKEALCIPVGDIETFEELLHSNPDAKLAFWKFWFLGSIPWDRKTVTPASLWHHPNLELISACGIETPQREAEGE

SEQ ID NO: 75127 - protein, 188 aa, Salmonella typhimurium
MLKLNATTTALVVIDLQEGILPFAGGPYTANEVVARAARLAEKCRANGSPVVMVRVGWSDDYAEALKQPVDAATPAHALPENWWTWPTALGKKDSDLEVTKRQWGAFYGTDLELQLRRRGIDTIILCGISTNIGVESTARNAWELGFNLIIAEDACSAASSEQHQSSMTHIFPRIGRVRSVEDILNAL

SEQ ID NO: 75128 - protein, 577 aa, Salmonella typhimurium
VNIQALLSEKVSQAMIAAGAPADCEPQVRQSAKVQFGDYQANGMMAVAKKLGMAPRQLAEQVLTHLDLSGIASKVEIAGPGFINIFLEPAFLAEQVQQALASDRLGVSQPTRQTIVVDYSAPNVAKEMHVGHLRSTIIGDAAVRTLEFLGHHVIRANHVGDWGTQFGMLIAWLEKQQQENAGDMALADLEGFYRDAKKHYDEDEAFAERARNYVVKLQSGDTYFREMWRKLVDITMTQNQITYDRLNVTLTRDDVMGESLYNPMLPGIVADLKAKGLAVESEGATVVFLDEFKNKEGDPMGVIIQKKDGGYLYTTTDIACAKYRYETLHADRVLYYIDSRQHQHLMQAWTIVRKAGYVPDSVPLEHHMFGMMLGKDGKPFKTRAGGTVKLADLLDEALERARRLVAEKNPDMPADELEKLANAVGIGAVKYADLSKNRTTDYIFDWDNMLAFEGNTAPYMQYAYTRVLSVFRKANIDEQALASAPVIISEDREAQLAARLLQFEETLTVVAREGTPHVMCAYLYDVAGLFSGFYEHCPILSAENDAVRNSRLKLAQLTAKTLKLGLDTLGIETVERM

SEQ ID NO: 75129 - protein, 263 aa, Salmonella typhimurium
MPVFALLALVAYSFSLALIVPGLLQKNSGWRRMAILSAVIALVCHAVALESRILPGGDSGQNLSLLNVGSLVSLMICTVMTIVASRNRGWLLLPIVYAFALINLAFATFMPNEYITHLEATPGMMVHIGLSLFSYATLIIAALYALQLAWIDYQLKNKKLAFSNEMPPLMSIERKMFHITQIGVVLLTLTLCTGLFYMHNLFSTENIDKAVLSIVAWFVYIVLLWGHYHEGWRGRRVVWFNVAGAGILTLAYFGSRILQQFVS

SEQ ID NO: 75130 - protein, 635 aa, Salmonella typhimurium
MIVFSSLQIRRGVRVLLDNASATINPGQKVGLVGKNGCGKSTLLALLKNEISADAGSFTLPGTWQLAWVNQETPALPQPAIEYVIDGDREYRQLEAQLNDANERNDGHAIASIHGKLDAIDAWTVRSRAASLLHGLGFSNDQLERPVSDFSGGWRMRLNLAQALICRSDLLLLDEPTNHLDLDAVIWLEKWLKSYPGTLILISHDRDFLDPIVDKIIHIEQQTLFEYTGNYSAFEVQRATRLAQQQAMYESQQERVAHLQSYIDRFRAKATKAKQAQSRIKMLERMELIAPAHVDNPFHFSFRAPESLPNPLLKMEKVSAGYGDRIILESIKLNLVPGSRIGLLGRNGAGKSTLIKLLAGELEPLHGEIGLAKGIKLGYFAQHQLEFLRADESPLQHMARLAPQELEQKLRDYLGGFGFQGDKVTEETQRFSGGEKARLVLALIVWQRPNLLLLDEPTNHLDLDMRQALTEALIDFEGALVVVSHDRHLIRSTTDDLYLVHDKKVEPFDGDLEDYQQWLSDVQKQENQADNAPKENNANSAQSRKDQKRREAELRTLTQPLRKEITRLEKEMEKLNAQLAQAEEKLGDSSLYDPSRKAEMTECLQLQASAKSGLEACEMAWLEAQEQLEQMMQND

SEQ ID NO: 75131 - protein, 292 aa, Salmonella typhimurium
MNNHFKCIGIVGHPRHPTALTTHEMLYRWLCDQGYEVIVEQQIAHELQLKNVPTGTLAEIGQQADLAVVVGGDGNMLGAARTLARYDINVIGINRGNLGFLTDLDPDNALQQLSDVLEGRYISEKRFLLEAQVCQQDRQKRISTAINEVVLHPGKVAHMIEFEVYIDETFAFSQRSDGLIISTPTGSTAYSLSAGGPILTPSLDAITLVPMFPHTLSARPLVINSSSTIRLRFSHRRSDLEISCDSQIALPIQEGEDVLIRRCDYHLNLIHPKDYSYFNTLSTKLGWSKKLF

SEQ ID NO: 75132 - protein, 167 aa, Salmonella typhimurium
MAAVGMVQKLNTPMNLEFYASNLYLHLSEWCSEHSLTGTATFLRTQAQGNVTQMMRMFNFMKNAGATPIVKAIDVPGEELCSLEELFQKTLEDYQQRASTLSRLADEAKALNDASTLDFLHTLEKEQQQDGVLLQTILEEVRSAKRAGLCLAQTDQHLLNVVTYQHH

SEQ ID NO: 75133 - protein, 111 aa, Salmonella typhimurium
MKPLIFTLSLLALTGCTITRQAQVSEASPISGIVRLTYNQPLFFTSRTDDYVSHGTATRECQQMGYADAVSFGQPVGTCSIYAGSLCLNTRFTLSWQCRGVAVPQIMPLYY

SEQ ID NO: 75134 - protein, 160 aa, Salmonella typhimurium; identical to SEQ ID NO: 73444

SEQ ID NO: 75135 - protein, 726 aa, Salmonella typhimurium
MTRAAPDVEEVLSERALSQWAQAISYVAGHYRVACSPGSIQANAPWLRGKSRTTALTQLARQAGLSFHAPDIDKTAFSQWRLPLVVELRDGQLLVIEHVNGEEAVDVFVIEEEGQRNRLTLSELLPEILYVAALRPLSALKDSRVDRYISRFKPDWMRELVLQDIRPYLPVMVAAFLINVLSLAGIVFSMQVYDRVIPAQSYPTLYVLSFGVLVAVLFGFLLREARTHIMDVLGKRADMRISDRVFGHALRLRNSAIPRSTGSFISQLRELEQIREMITSSTLATIVDLPFFFLFMIVLAIIAPPLAWIAPVAALLMILPGVALQKKLAVLANQAAHEATLRNAVLVESVQGLEDIKLMQAENRFLQQWNSYIRITGESGLRTRKLTQGLISWGMSVQSLVYAAVIMFGAPMVIEGSMTTGAVVAASMLGSRMIAPMANLCGVLARWQQVKAAKMGLDNIMQLPTETQHDDSLIHRDILHGHYLFENAQFRYHNDDQRIPLRLVRLEIMPGERIAILGRNGAGKSTLLQAMAGGLEMIQGDARLDNLSLSHIDMADLRRNIGFLSQNARLFFGTLRENLTLGAPHANDEQIFDALEVSGGAVFVRRLAKGLDHPIMEGGNGLSGGQRQSLLLARMLLRSPNIVLLDEPSASLDEHTEREFIQRLHQWLGNRTLVVATHRVPILELVERVVVLKEGQLVMDAPKAQALNADRMQSHRREWKNENQSA

SEQ ID NO: 75136 - protein, 331 aa, Salmonella typhimurium
MSNLSGTDKSVILLMTIGEDRAAEVFKHLSTREVQALSTAMANVRQISNKQLTDVLSEFEQEAEQFAALNINANEYLRSVLVKALGEERASSLLEDILETRDTTSGIETLNFMEPQSAADLIRDEHPQIIATILVHLKRSQAADILALFDERLRHDVMLRIATFGGVQPAALAELTEVLNGLLDGQNLKRSKMGGVRTAAEIINLMKTQQEEAVITAVREFDGELAQKIIDEMFLFENLVDVDDRSIQRLLQEVDSESLLIALKGAEPPLREKFLRNMSQRAADILRDDLANRGPVRLSQVENEQKAILLIVRRLAETGEMVIGSGEDTYV

SEQ ID NO: 75137 - protein, 207 aa, Salmonella typhimurium
MSTIIMDLCSYTRLGLSGYLVSRGVKKREINDIETVDELAIACGAHQPSVVFINEDCFIHTPSDSQQIKQIINQHPDTLFIVFMAIANVHFDEYLLVRKNLLISSKSIKPDSLDTLLGDILKKESGISGTINLPTLSLSRTESSMLRMWMEGQGTIQISDRMNIKAKTVSSHKGNIKRKIKTHNKQVIYHVVRLTDNVTNGIFVNMR

SEQ ID NO: 75138 - protein, 398 aa, Salmonella typhimurium
MNRKVLALLVPALLVAGAANAAEVYNKNGNKLDLYGKVDGLRYFSDNAGDDGDQSYARFGFKGETQINDMLTGYGQWEYNIKVNTTEGEGANSWTRLGFAGLKFGEYGSFDYGRNYGVIYDIEAWTDALPEFGGDTYTQTDVYMLGRTNGVATYRNTDFFGLVEGLNFALQYQGNNEDPGAGEGTANGSDADSGTRKLARENGDGFGMSTSYDFDFGLSLGAAYSSSDRTDNQVASGRGDGHHYYGNSYAGGETAEAWTVGVKYDAYNVYLAAMYAETRNMTYYGGGDGGDGGIANKTQNFEVVAQYQFDFGLRPSIAYLQSKGKDLGGQDMDSRGNYRYTDKDLVKYVDVGMTYYFNKNMSTYVDYKINLLDEDDDFYANNGIATDDIVGVGLVYQF

SEQ ID NO: 75139 - protein, 281 aa, Salmonella typhimurium
MNNLPVVRSPWRILILVLGFTFLYAPMLMLVIYSFNSSKLVTVWAGWSTRWYGELFRDTAMMSAVGLSLTIAACAATMAVVLGTIAAVVMVRFGRFRGANGFAFMITAPLVMPDVITGLSLLLLFVALGHAIGWPSDRGMLTIWLAHVTFCTAYVAVVIASRLRELDRSIEEAAMDLGAAPLKVFFVITLPMIMPAVISGWLLAFTLSLDDLVIASFVSGPGATTLPMLVFSSVRMGVNPEINALATLILGVVGIVGFIAWYLMARAEKQRIRDIQRARRG

SEQ ID NO: 75140 - protein, 157 aa, Salmonella typhimurium
LGFIKQSTSSHARLNVPTLVQVAAMAIILIRGLDVLMIMNTLGIRGMGEFIHRSVQTWSLTLVFLASLVLVFVEIYCAFSLVKGRSWARWVYLATQIIVSGYLWAASLGYGYPELFSIAGESKRDILHSLVMQKLPDLLILFLLFIPAPSRRFFRLQ

SEQ ID NO: 75141 - protein, 161 aa, Salmonella typhimurium
MNLLPVLLKKYWLQLSVTLLIAALAWTTEHYRDNAIQYKSQRDTASHRLTLANATITDMTKRQRDIAALDARYTKELADAKAENDALRDDVAAGRRRLLVNATCPAMPTGKSTSAARVDNAARPRLADSAQRDYFTLKERVTTMQKQLEGAQDYIRTQCLK

SEQ ID NO: 75142 - protein, 790 aa, Salmonella typhimurium
MPVLISGVLKDGTGMPVQNCTIQLKACRTSTAVVVNTVASENPDEAGRYSMDVEQGQYTVTLLVEGYPPSPAGVITVYVDSKPGTLNDFLGAMTEDDVRPEALRRFEAMVEEVARQASEASRNATAAGQASEQAQTSAGQAAESATAAASAAGAADASATQAASSAASAESSAGTATTKAGEASASAASADTARTAAAASEAAAKTSEANADASRTAAGDSAAAAAASATAAQTSAERAGASETAAKTSETQAASSAGDAGASATAAAASEKAAAASAAEAKTSETNAATSASTAAASATAASSSASEASTHAAASDTSASLAAQSRAAAGESATRAEEAAKRAEDIADVISLEDASLTKKGIVQLSSATDSDSEALASTPKAVKTVMGEVQTKAPLDSPALTGTPTAPTPETTAAGIEIATAAFVAAKVAQLVGSAPEALDTLKELADALGNDPNFATTVLNKLAGKQPLDDTLTALSGKSVDGLIEYIGLRNTIDKAAGALPAGGTAVAANRLVSRGALPALTGTTRGSDSGLIMGEVYNNGYPTQYGNILRLTGTGDGEILIGWSGANGAPAPAYIRSHRDTADAEWSEWAMLYTTLNPPPDSHPVGAAIAWPSDATPAGYALMQGQSFDKSAYPLLAIAYPSGVIPDMRGWTIKGKPASGRAVLSQEMDGNKSHSHTARAQDTDLGTKTTSSFDYGTKSTNTTGGHTHEFGGYINSYWGDSNHTSFQPGGGAWTQAAGDHAHTVYIGGHEHTMYIGPHGHVVIVDADGNAETTVKNIAFNYIVRLA

SEQ ID NO: 75143 - protein, 307 aa, Salmonella typhimurium
VRTLRIGIVGLGGIAQKAWLPVLTNTAGWTLQGAWSPSRDKALRICESWRIPYVDSLANLASSCDAVFVHSSTASHYAVVSELLNAGVHVCVDKPLAENLRDAERLVALAAQKKLTLMVGFNRRFAPLYRELKTRLGTAASLRMDKHRTDSVGPHDLRFTLLDDYLHVVDTALWLAGGEARLASGTLLTSESGEMCYAEHHFSADKLQITTSMHRRAGSQRESVQAVTDGGLYDVTDMREWREERGQGILIKPIPSWQTTLEQRGFVGCARHFIDCVQNQTVPETAGEQAILAQRVVEALWRDAISE

SEQ ID NO: 75144 - protein, 552 aa, Salmonella typhimurium
MILERVEIVGFRGINRLSLMLEQNNVLIGENAWGKSSLLDALTLLLSPELDLYHFVREDFWFPPGDIKGREHHLHIILTFRETQPGRHRVRRYRALEACWSLCEDDFHRIFYRLEGECGADGSVMTLRSFLNSDGQPLLVENINDQVRHLVRLMPVLRLRDARFMRRIRNGTVPNVPDVEVTARQLDFLARELATRPQNLTDGQIRQGLSAMVQLLEHYFSEQGAGQARHRLMRRRSQNEQRTWRYLDIINRMIDKPGSRSHRVILLGLFSTLLQAKGTLRLHKDARPLLLVEDPETRLHPIMLSVAWQLLNLLPLQRIATTNSGELLSLTPVEHVVRLVRESSRVAAWRLGPGGLSAEDGRRIAFHIRFNRASSLFARCWLLVEGETETWVINELARQCGHHFDAEGIKVIEFAQSGLKPLVKFARRMGIEWHVLVDGDEAGKKYAATVRSLLNNDREEEREHLTALPALDMEHFMYRQGFADVFHRVAQLPPNVPMNTRKIITKAIHRSSKPDLAIEVAMEAGRRGIDAVPPLFRKMFSRVVWLARGRAD

SEQ ID NO: 75145 - protein, 232 aa, Salmonella typhimurium
MSIAVNMNDPTNTGVKTTTGSGSMTGSNAADLQSSFLTLLVAQLKNQDPTNPLQNNELTTQLAQISTVSGIEKLNTTLGAISGQIDNSQSLQATTLIGHGVMVPGTTILAGKGAEEGAVTSTTPFGVELQQPADKVTATITDKDGRVVRTLEIGELRAGVHTFTWDGKQTDGTTVPNGSYNIAITASNGGTQLVAQPLQFALVQGVTKGSNGNLLDLGTYGTTTLDEVRQII

SEQ ID NO: 75146 - protein, 758 aa, Salmonella typhimurium
MLNQELELSLNMAFARAREHRHEFMTVEHLLLALLSNPSAREALEACSVDLVALRQELEAFIEQTTPVLPASEEERDTQPTLSFQRVLQRAVFHVQSSGRSEVTGANVLVAIFSEQESQAAYLLRKHEVSRLDIVNFISHGTRKDEPSQSSDLGNQPTGDEQAGGEERMENFTTNLNQLARVGGIDPLIGREKELERAIQVLCRRRKNNPLLVGESGVGKTAIAEGLAWRIVQGDVPEVMADCTIYSLDIGSLLAGTKYRGDFEKRFKALLKQLEQDTNSILFIDEIHTIIGAGAASGGQVDAANLIKPLLSSGKIRVIGSTTYQEFSNIFEKDRALARRFQKIDITEPSVEETVQIINGLKPKYEAHHDVRYTAKAVRAAVELAVKYINDRHLPDKAIDVIDEAGARARLMPVSKRKKTVNVADIESVVARIARIPEKSVSQSDRDTLKNLGDRLKMLVFGQDNAIEALTEAIKMSRAGLGHEHKPVGSFLFAGPTGVGKTEVTVQLSKALGIELLRFDMSEYMERHTVSRLIGAPPGYVGFDQGGLLTDAVIKHPHAVLLLDEIEKAHPDVFNLLLQVMDNGTLTDNNGRKADFRNVVLVMTTNAGVRETERKSIGLIHQDNSTDAMGEIKKVFTPEFRNRLDNIIWFDHLSGEVIHQVVDKFIVELQAQLDQKGVSLEVSQEARDWLAEKGYDRAMGARPMARVIQDNLKKPLANELLFGSLVDGGQVTVALDKEKNALTYDFQSAQKHKPEAAH

SEQ ID NO: 75147 - protein, 1351 aa, Salmonella typhimurium
LSQEYTEDKDVTLTKLSSGRRLLEALLILIALFAVWLMAALLSFNPSDPSWSQTAWHEPIHNLGGAPGAWLADTLFFIFGVMAYTIPVIIVGGCWFAWRHQSTDDYIDYFAVSLRLIGVLALILTSCGLAAINADDIWYFASGGVIGSLLSTTLQPLLHSSGGTIMLLCIWAAGLTLFTGWSWVSIAEKLGGWLLNILTFASNRTRRDDTWVDDEEYDDEYDEETDGVQRESRRARILRGALARRKRLAEKFSNPRGRQTDAALFSGKRMDDDEDIQYSARGVAADPDDVLFSGNRATQPEYDEYDPLLNGHSVTEPVAAAAAATAVTQTWAASADPIMQTPPMPGAEPVVAQPTVEWQPVPGPQTGEPVIAPAPEGYQPHPQYAQPQEAQSAPWQQPVPVASAPQYAATPATAAEYDSLAPQETQPQWQPEPTHQPTPVYQPEPIAAEPSHMPPPVIEQPVATEPEPDTEETRPARPPLYYFEEVEEKRAREREQLAAWYQPIPEPVKENVPVKPTVSVAPSIPPVEAVAAAASLDAGIKSGALAAGAAAAAPAFSLATGGAPRPQVKEGIGPQLPRPNRVRVPTRRELASYGIKLPSQRIAEEKAREAERNQYETGAQLTDEEIDAMHQDELARQFAQSQQHRYGETYQHDTQQAEDDDTAAEAELARQFAASQQQRYSGEQPAGAQPFSLDDLDFSPMKVLVDEGPHEPLFTPGVMPESTPVQQPVAPQPQPQYQQPQQPVAPQPQYQQPQQPVAPQPQYQQPQQPVAPQPQYQQPQQPVAPQPQYQQPQQPVAPQPQYQQPQQPVAPQPQYQQPQQPVAPQPQYQQPQQPTAPQDSLIHPLLMRNGDSRPLQRPTTPLPSLDLLTPPPSEVEPVDTFALEQMARLVEARLADFRIKADVVNYSPGPVITRFELNLAPGVKAARISNLSRDLARSLSTVAVRVVEVIPGKPYVGLELPNKKRQTVYLREVLDNAKFRENPSPLTVVLGKDIAGDPVVADLAKMPHLLVAGTTGSGKSVGVNAMILSMLYKAQPEDVRFIMIDPKMLELSVYEGIPHLLTEVVTDMKDAANALRWSVNEMERRYKLMSALGVRNLAGYNEKIAEAARMGRPIPDPYWKPGDSMDVQHPVLEKLPYIVVLVDEFADLMMTVGKKVEELIARLAQKARAAGIHLVLATQRPSVDVITGLIKANIPTRIAFTVSSKIDSRTILDQGGAESLLGMGDMLYSGPNSTMPVRVHGAFVRDQEVHAVVQDWKARGRPQYVDGITSDSESEGGGGGFDGGEELDALFDQAVNFVTQKRKASISGVQRQFRIGYNRAARIIEQMEAQGIVSAQGHNGNREVLAPPPFE

SEQ ID NO: 75148 - protein, 447 aa, Salmonella typhimurium
VSNLSLDFSDNTFQPLAARMRPENLAQYIGQQHLLAAGKPLPRAIEAGHLHSMILWGPPGTGKTTLAEVIARYASADVERISAVTSGVKEIREAIERARQNRNAGRRTILFVDEVHRFNKSQQDAFLPHIEDGTITFIGATTENPSFELNSALLSRARVYLLKSLTTDDIEQVLDQAMQDKTRGYGDQDIVLPDETRRAIAELVNGDARRALNTLEMMADMAEADDSGKRVLLPALLTEIAGERSARFDNKGDRFYDLISALHKSVRGSAPDAALYWYARIITAGGDPLYVARRCLAIASEDVGNADPRAMQVAIAAWDCFTRVGPAEGERAIAQAIVYLACAPKSNAVYTAFKAALADARERPDYDVPVHLRNAPTKLMKEMGYGQEYRYAHDEPNAYAAGEVYFPPEIAQTRYYHPTNRGLEGKIGEKLAWLAEQDQNSPTKRYR

SEQ ID NO: 75149 - protein, 317 aa, Salmonella typhimurium
MYTKIIGTGSYLPEQVRTNADLEKMVETSDEWIVTRTGIRKRHIAAPNETVATMGFTAANRAIEMAGIDKDQIGLIVVATTSATHAFPSAACQIQSMLGIKGCPAFDVAAACAGFTYALSIADQYVKSGAVKHALVVGSDVLARTCDPGDRGTIIIFGDGAGAAVLSASEEPGIISTHLHADGRYGELLTLPNADRVNPDNPIYLTMAGNEVFKVAVTELAHIVDETLAANNLDRSELDWLVPHQANLRIISATAKKLGMSMDNVVVTLDRHGNTSAASVPCALDEAVRDGRIKAGQLVLLEAFGGGFTWGSALIRF

SEQ ID NO: 75150 - protein, 430 aa, Salmonella typhimurium
MLDPNLLRNEPDAVAEKLARRGFKLDVDKLRALEERRKVLQVNTENLQAERNSRSKSIGQAKARGEDIEPLRLEVNKLGEELDAAKAELDTLLAEIRDIALTIPNLPADEVPVGKDENDNVEVSRWGTPREFDFEIRDHVTLGEMHSGLDFAAAVKLTGSRFVVMKGQIARMHRALSQFMLDLHTEQHGYSENYVPYLVNHDTLYGTGQLPKFAGDLFHTRPLEEEADSSNYALIPTAEVPLTNLVRDEIIDEDQLPIKMTAHTPCFRSEAGSYGRDTRGLIRMHQFDKVEMVQIVRPEDSMAALEEMTGHAEKVLQLLGLPYRKIILCTGDMGFGACKTYDLEVWVPAQNTYREISSCSNVWDFQARRMQARCRSKSDKKTRLVHTLNGSGLAVGRTLVAVMENYQQADGRIEVPEVLRPYMNGLEYIG

SEQ ID NO: 75151 - protein, 309 aa, Salmonella typhimurium
MTQFAFVFPGQGSQSVGMLAEMAANYPIVEETFAEASAALGYDLWALTQQGPAEELNKTWQTQPALLTASVALWRVWQQQGGKMPALMAGHSLGEYSALVCAGVINFADAVRLVEMRGKFMQEAVPEGTGGMSAIIGLDDASIAKACEESAEGQVVSPVNFNSPGQVVIAGHKEAVERAGAACKAAGAKRALPLPVSVPSHCALMKPAADKLAVELAKITFSAPTVPVVNNVDVKCETDAAAIRDALVRQLYNPVQWTKSVEFIAAQGVEHLYEVGPGKVLTGLTKRIVDTLTASALNEPAALSAALTQ

SEQ ID NO: 75152 - protein, 244 aa, Salmonella typhimurium
MSFEGKIALVTGASRGIGRAIAETLVARGAKVIGTATSENGAKNISDYLGANGKGLMLNVTDPASIESVLENIRAEFGEVDILVNNAGITRDNLLMRMKDDEWNDIIETNLSSVFRLSKAVMRAMMKKRCGRIITIGSVVGTMGNAGQANYAAAKAGLIGFSKSLAREVASRGITVNVVAPGFIETDMTRALSDDQRAGILAQVPAGRLGGAQEIASAVAFLASDEASYITGETLHVNGGMYMV

SEQ ID NO: 75153 - protein, 78 aa, Salmonella typhimurium; identical to SEQ ID NO: 43145

SEQ ID NO: 75154 - protein, 413 aa, Salmonella typhimurium
VSKRRVVVTGLGMLSPVGNTVESTWKALLAGQSGISLIDHFDTSAYATKFAGLVKDFNCDDIISRKEQRKMDAFIQYGIVAGVQAMQDSGLEVTEENASRIGAAIGSGIGGLGLIEENHSSLVKGGPRKISPFFVPSTIVNMVAGHLTIMYGLRGPSISIATACTSGVHNIGHAARIIAYGDADAMVAGGAEKASTPLGVGGFGAARALSTRNDNPQAASRPWDKERDGFVLGDGAGMLVLEEYEHAKARGAKIYAEIVGFGMSSDAYHMTSPPENGAGAALAMVNALRDAAIEPAQIGYVNAHGTSTPAGDKAETQAVKSVFGDAASRVMVSSTKSMTGHLLGAAGAVESIFSILALRDQAIPPTINLDNPDEGCDLDFVPHEARQVSDLEYALCNSFGFGGTNGSLIFKKI

SEQ ID NO: 75155 - protein, 269 aa, Salmonella typhimurium
MFLINGHAQDQLAVSDRATQFGDGSFTTARIVDGNICHLEAHLQRLQVACEKLRIAFSHWSTLRQEMTMLATGHDSGVLKVIISRGSGGRGYSAMNCQAATRILSVSAYPAYYSQWRKQGITLTLSPIPLGRNPYLAGLKHLNRLEQVLIRSHLEQTDADEALVLDSEGWVTECCAANLFWRTGDIVFTPRLDQAGVNGIMRQFCLRQLAQSPFQVLEVQAREEAVRQADEIIICNALMPIIPIRAYHGTSYSSRTLFQFLAPFCEHPN

SEQ ID NO: 75156 - protein, 213 aa, Salmonella typhimurium
MGSNYIVIEGLEGAGKTTARDVVVETLEQLGIRNMIFTREPGGTQLAEKLRSLVLDIRSVGDEVITDKAEVLMFYAARVQLVETVIKPALAQGVWVIGDRHDLSTQAYQGGGRGIDQTMLATLRDAVLGDFRPDLTLYLDVTPEVGLKRARARGDLDRIEQESFDFFNRTRARYLELAAQDSRIRTIDATQPLDAVMRDIRATVTKWVQEQAA

SEQ ID NO: 75157 - protein, 265 aa, Salmonella typhimurium
MFLVDSHCHLDGLDYQSLHKDVDDVLAKAAARDVKFCLAVATTLPGYRHMRKLVGKRDNVVFSCGVHPLNQDEAYDVEELRLLAAEDDVVAMGETGLDYFYTPETKIRQQASFIHHIQIGRELHKPVIVHTRDARADTLAILREEKVTDCGGVLHCFTEDRETAGKLLDLGFYISFSGIVTFRNAEQLRDAARYVPLDRLLVETDSPYLAPVPHRGKENQPAMVRDVAEYMAVLKGVAVEELAQITTDNFARLFHIDASRLSSIR

SEQ ID NO: 75158 - protein, 341 aa, Salmonella typhimurium
VGPVMLNVEGCELDAEEREILAHPLVGGLILFTRNYHDPEQLRELVRQIRAASRNHLVVAVDQEGGRVQRFREGFTRLPAAQSFFALHGLEEGGRLAQEAGWLMASEMIAMDIDISFAPVLDVGHISAAIGERSYHADPAKALAMATRFIDGMHDAGMKTTGKHFPGHGAVTADSHKETPCDPRPETDIRGKDMSVFRTLISENKLDAIMPAHVIYRAIDPRPASGSPYWLKTVLRQELGFDGVIFSDDLSMEGAAIMGSYAERAQASLDAGCDMILVCNNRKGAVSVLDNLSPIKAERVTRLYHKGSFSRRELMDSARWKTASAQLNQLHERWQEEKAGH

SEQ ID NO: 75159 - protein, 434 aa, Salmonella typhimurium
LTTPLKKIVIVGGGAGGLEMATQLGHKLGRKKKAKITLVDRNHSHLWKPLLHEVATGSLDEGVDALSYLAHARNHGFQFQLGSVMDIDREAKTITIAELRDEKGELLVPERKIAYDTLVMALGSTSNDFNTPGVKEHCIFLDNPHQARRFHQEMLNLFLKYSANLGANGKVNIAIVGGGATGVELSAELHNAVKQLHSYGYKGLTNDALNVTLVEAGERILPALPPRISSAAHNELTKLGVRVLTQTMVTSADEGGLHTKEGEYIQADLMVWAAGIKAPDFMKEIGGLETNRINQLVVEPTLQTTRDPDIYAIGDCASCARPEGGFVPPRAQAAHQMATCAMKNILAQMNGKPLKAYQYKDHGSLVSLSNFSTVGSLMGNLTRGSMMIEGRIARFVYISLYRMHQIALHGYFKTGLMMLVGSINRVIRPRLKLH

SEQ ID NO: 75160 - protein, 436 aa, Salmonella typhimurium
LSAFFRITLTNSYGSDIYAFRFRLYTRDFANSNQTDYMYQPVALFIGLRYMRGRAADRFGRFVSWLSTIGITLGVMALVTVLSVMNGFERELQNNILGLMPQAILSAEHGSLNPNQMPEKAVNLQGVNRIAPLTTGDVVLQSARSVAVGVMLGIDPAQKDPLTPYLVNVKQSELQPGKYNVILGEQLAGQLGVNRGDQIRLMVPSASQFTPMGRLPSQRLFTVIGTFAANSEVDGYEMLVNIQDASRLMRYPAGNITGWRLWLDEPLQVDTLSQQTLPQGTKWQDWRERKGELFQAVRMEKNMMGLLLSLIVAVAAFNIITSLGLMVMEKQGEVAILQTQGLTPRQIMMVFMVQGASAGIIGALLGAALGALLASQLNNLMPIIGAFLDGAALPVAIEPLQVIVIALVAMAIALLSTLYPSWRAAATQPAEALRYE

SEQ ID NO: 75161 - protein, 409 aa, Salmonella typhimurium
MDKLLERFLHYVSLDTQSKSGVRQVPSTEGQWKLLRLLKQQLEEMGLVNITLSEKGTLMATLPANVEGDIPAIGFISHVDTSPDFSGKNVNPQIVENYRGGDIALGIGDEVLSPVMFPVLHQLLGQTLITTDGKTLLGADDKAGVAEIMTALAVLKGNPIPHGDIKVAFTPDEEVGKGAKHFDVEAFGAQWAYTVDGGGVGELEFENFNAASVNIKIVGNNVHPGTAKGVMVNALSLAARIHAEVPADEAPETTEGYEGFYHLASMKGTVDRAEMHYIIRDFDRKQFEARKRKMMEIAKKVGKGLHPDCYIELVIEDSYYNMREKVVEHPHILDIAQQAMRDCHITPEMKPIRGGTDGAQLSFMGLPCPNLFTGGYNYHGKHEFVTLEGMEKAVQVIVRIAELTAKRGQ

SEQ ID NO: 75162 - protein, 549 aa, Salmonella typhimurium
MKNINPTQTSAWQALQKHYDEMKDVTIAELFANDSDRFAKFSATFDDLMLVDFSKNRITEETLAKLQDLAKETDLAGAIKSMFSGEKINRTEDRAVLHVALRNRSNTPIIVDGKDVMPEVNAVLEKMKTFSQAIISGQWKGYTGKAITDVVNIGIGGSDLGPFMVTEALRPYKNHLTMHFVSNVDGTHIAEVLKKVNPETTLFLVASKTFTTQETMTNAHSARDWFLKTAGDEKHVAKHFAALSTNAKAVGEFGIDTANMFEFWDWVGGRYSLWSAIGLSIILSVGFDNFVELLSGAHAMDKHFSTTPAEKNLPILLALIGIWYNNFFGAETEAILPYDQYMHRFAAYFQQGNMESNGKYVDRNGNAVDYQTGPIIWGEPGTNGQHAFYQLIHQGTKMVPCDFIAPAITHNPLSDHHQKLLSNFFAQTEALAFGKSREVVEQEYRDQGKDPAQLEHVVPFKVFEGNRPTNSILLREITPFSLGALIALYEHKIFTQGVILNIFTFDQWGVELGKQLANRILPELGDDKAISSHDSSTNGLINRYKAWRA

SEQ ID NO: 75163 - protein, 416 aa, Salmonella typhimurium
MESKVVVPVEGKKITLQNGKLNVPENPIIPFIEGDGIGVDVTPAMLKVVDAAVEKAYKGERKISWMEIYTGEKSTQVYGQDVWLPAETLDLIRDYRVAIKGPLTTPVGGGIRSLNVALRQELDLYVCLRPVRYYQGTPSPVKHPELTDMVIFRENSEDIYAGIEWKADSADAEKVIKFLREEMGVKKIRFPEHCGIGIKPCSEEGTKRLVRAAIEYAITNDRDSVTLVHKGNIMKFTEGAFKDWGYQLARDEFGGELIDGGPWLKIKNPNTGKEIVVKDVIADAFLQQILLRPAEYDVIACMNLNGDYISDALAAQVGGIGIAPGANIGDECALFEATHGTAPKYAGQDKVNPGSIILSAEMMLRHMQWFEAADLIVKGMEGAIAAKTVTYDFERLMEGAKLLKCSEFGDAIIANM

SEQ ID NO: 75164 - protein, 369 aa, Salmonella typhimurium
MASVQLRNVTKAWGDVVVSKDINLDIHDGEFVVFVGPSGCGKSTLLRMIAGLETITSGDLFIGETRMNDIPPAERGVGMVFQSYALYPHLSVAENMSFGLKLAGAKKEVMNQRVNQVAEVLQLAHLLERKPKALSGGQRQRVAIGRTLVAEPRVFLLDEPLSNLDAALRVQMRIEISRLHKRLGRTMIYVTHDQVEAMTLADKIVVLDAGRVAQVGKPLELYHYPADRFVAGFIGSPKMNFLPVKVTATAIEQVQVELPNRQQIWLPVESRGVQVGANMSLGIRPEHLLPSDIADVTLEGEVQVVEQLGHETQIHIQIPAIRQNLVYRQNDVVLVEEGATFAIGLPPERCHLFREDGSACRRLHQEPGV

SEQ ID NO: 75165 - protein, 452 aa, Salmonella typhimurium
MMITLRKLPLAVAVAAGVMSAQAMAVDFHGYARSGIGWTGSGGEQQCFQATGAQSKYRLGNECETYAELKLGQEVWKEGDKSFYFDTNVAYSVNQQNDWESTDPAFREANVQGKNLIEWLPGSTIWAGKRFYQRHDVHMIDFYYWDISGPGAGIENIDLGFGKLSLAATRSTEAGGSYTFSSQNIYDEVKDTANDVFDVRLAGLQTNPDGVLELGVDYGRANTTDGYKLADGASKDGWMFTAEHTQSMLKGYNKFVVQYATDAMTTQGKGQARGSDGSSSFTEELSDGTKINYANKVINNNGNMWRILDHGAISLGDKWDLMYVGMYQNIDWDNNLGTEWWTVGVRPMYKWTPIMSTLLEVGYDNVKSQQTGDRNNQYKITLAQQWQAGDSIWSRPAIRIFATYAKWDEKWGYIKDGDNISRYAAATNSGISTNSRGDSDEWTFGAQMEIWW

SEQ ID NO: 75166 - protein, 155 aa, Salmonella typhimurium
MALRTLSALPVFADSLFSDRFNRIDRLFSQLTGDTPVAATPAYDLQKRDANNYLLTVSVPGWKEEELEIETVGGNLNITGKHTEETVEDQTHWIYRGIRKADFQLSFSLPEHAKVNNAKLEQGLLLVEIYQEIPESEKPKKIAIESKPKAIEHKS

SEQ ID NO: 75167 - protein, 70 aa, Salmonella typhimurium; identical to SEQ ID NO: 73412

SEQ ID NO: 75168 - protein, 332 aa, Salmonella typhimurium
MQPETQSSALPAYRFSIAPMLDWTDRHCRYFLRLLSRQTQLYTEMVTTGAIIHGKGDYLAYSEEEHPVALQLGGSDPAQLAHCAKLAEARGYDEINLNVGCPSDRVQNGMFGACLMGNAQLVADCVKAMRDVVSIPVTVKTRIGIDDQDSYAFLCDFIDTVSGQGECEMFIIHARKAWLSGLSPKENREIPPLDYPRVYQLKRDFPHLTMSINGGIKSLEEAKEHLRHMDGVMVGREAYQNPGILAAVDREIFGADTTDADPVAVVRAMYPYIERELSQGAYLGHITRHMLGLFQGIPGARQWRRYLSENAHKAGADVAVLEQALKLVADKR

SEQ ID NO: 75169 - protein, 471 aa, Salmonella typhimurium; identical to SEQ ID NO: 73265

SEQ ID NO: 75170 - protein, 359 aa, Salmonella typhimurium
MQAATVVINRRALRHNLQRLRELAPASKLVAVVKANAYGHGLLETARTLPDADAFGVARLEEALRLRAGGITQPILLLEGFFDAADLPTISAQCLHTAVHNQEQLAALEAVELAEPVTVWMKLDTGMHRLGVRPEEAEAFYQRLTHCKNVRQPVNIVSHFARADEPECGATEHQLDIFNAFCQGKPGQRSIAASGGILLWPQSHFDWARPGIILYGVSPLEHKPWGPDFGFQPVMSLTSSLIAVRDHKAGEPVGYGGTWVSERDTRLGVVAMGYGDGYPRAAPSGTPVLVNGREVPIVGRVAMDMICVDLGPNAQDNAGDPVVLWGEGLPVERIAEMTKVSAYELITRLTSRVAMKYID

SEQ ID NO: 75171 - protein, 695 aa, Salmonella typhimurium
MWRRLIYHPEINYALRQTLVLCLPVAVGLLIGQLHLGLLFSLVPACCNIAGLDTPHKRFFKRLIIGASLFAGCSLVTQLLLAESIPLPLILTGLTLVLGVTAEISPLHARLLPASLIAAIFTLSLAGYMPVWEPLLIYALGTLWYGVFNWFWFWLWREQPLRESLSLLYRELADYCEAKYSLLTQHIDPEKALPPLLIRQQKAVDLITQCYQQMHMLSAHNNNDYKRLLRAFQEAMDLQEHISVSLHQPEEVQKLVERSHAEEVIRWNAQTVAARLRVLADDILYHRLPTRFSMEKQIGALEKIANQHPENPVGQFCYWHFSRIARVLRTQRPLYARDLMADKQRRLPLLPALKNYMSLKSPALRNAGRISVMMSIASLMGSALHLPKPYWILMTVLFVTQNGYGATRVRILHRSVGTLVGLVIAGVTLHLHIPESITLAVMLVLTLASYLIIRKNYGWATVGFTVTAVYTIQLLTLNGEQFIVPRLIDTLIGCLIAFGGMVWLWPQWQSGLLRKNAHDALEAAQEAIRLILSNDPQATPLAYQRMRVNQAHNTLFNSLNQAMQEPGFNTHYLSDMKLWVTHSQFIVEHINAMTTLAREHTMLTPDLAQRYLESCEIAIQRCQQRLEYDRPGGSGDVNILESPDMPSHGLLSTLEQHLQRIIGHLNTMHTISSMAWRQRPHHGIWLSKRLRDTKG

SEQ ID NO: 75172 - protein, 393 aa, Salmonella typhimurium
MTNSNRIKLTWISFLSYALTGALVIVTGMVMGNIADYFHLPVSSMSNTFTFLNAGILISIFLNAWLMEIIPLKTQLRFGFILMVLAVAGLMFGHSLALFSAAMFVLGLVSGITMSIGTFLITQLYEGRQRGSRLLFTDSFFSMAGMIFPMVAAFLLARSIEWYWVYACIGLVYLAIFILTFGCEFPALGKHAQHSQAPVVKEKWGIGVLFLAVAALCYILGQLGFISWVPEYAKGLGMSLNDAGALVSDFWMSYMFGMWAFSFILRFFDLQRILTVLAGMAAVLMYLFITGTQAHMPWFILTLGFFSSAIYTSIITLGSQQTKVASPKLVNFILTCGTIGTMLTFVVTGPIVAHSGPQAALLTANGLYAVVFVMCFALGFVSRHRQHSAPATH

SEQ ID NO: 75173 - protein, 847 aa, Salmonella typhimurium
MSKVRLAIIGNGMVGHRFIEDLLDKSDASLFDITVFCEEPRKAYDRVHLSSYFSHHTAEELSLVREGFYEKHGVKVLVGERAITINRQEKVIHSSAGRTVYYDKLIMATGSYPWIPPIKGSETQDCFVYRTIEDLNAIEACARRSKRGAVVGGGLLGLEAAGALKNLGVETHVIEFAPMLMAEQLDQMGGEQLRRKIESMGVRVHTSKNTQEIVQQGNEARKTMRFADGSELEVDFIVFSTGIRPRDKLATQCGLAVAQRGGIVINDTCQTSDPDIYAIGECASWNNRVYGLVAPGYKMAQVAVDHILGSENAFEGADLSAKLKLLGVDVGGIGDAHGRTPGARSYVYLDESKEVYKRLIVSEDNKTLLGAVLVGDTSDYGNLLQLVLNAIELPENPDSLILPSHAGSGKPAIGVDKLPDSAQICSCFDVTKGDLIAAINKGCHTVAALKAETKAGTGCGGCIPLVTQVLNAELAKQGIEVNNNLCEHFAYSRQELFHLIRVEGIKTFEELLAKHGKGYGCEVCKPTVGSLLASCWNEYILKPQHTPLQDTNDNFLANIQKDGTYSVIPRSAGGEITPEGLVAVGRIAREFNLYTKITGSQRIGLFGAQKDDLPEIWRQLIEAGFETGHAYAKALRMAKTCVGSTWCRYGVGDSVGFGVELENRYKGIRTPHKMKFGVSGCTRECAEAQGKDVGIIATEKGWNLYVCGNGGMKPRHADLLAADLDRDTLIKYLDRFMMFYIRTADKLTRTAPWLDNLEGGIEYLKSVIIDDKLGLNEHLEEEMARLRAAVVCEWTETVNTPSAQVRFKHFINSDKRDPNVQVVPEREQHRPATPYERIPVTLVEENA

SEQ ID NO: 75174 - protein, 176 aa, Salmonella typhimurium
MASRGVNKVILVGNLGQDPEVRYMPSGGAVANLTLATSESWRDKQTGEMKEQTEWHRVVMFGKLAEVAGEYLRKGSQVYIEGQLRTRKWTDQSGQERYTTEINVPQIGGVMQMLGGRQGGGAPAGGQQQGGWGQPQQPQQPQGGNQFSGGAQSRPQQSAPAPSNEPPMDFDDDIPF

SEQ ID NO: 75175 - protein, 457 aa, Salmonella typhimurium
VDHLPIFCQLRDRDCLIVGGGDVAERKARLLLEAGARLTVNALTFIPQFTVWANEGMLTLVEGPFDETLLDSCWLAIAATDDDTVNQRVSDAAESRRIFCNVVDAPKAASFIMPSIIDRSPLMVAVSSGGTSPVLARLLREKLESLLPQHLGQVARYAGQLRARVKKQFATMGERRRFWEKFFVNDRLAQSLANADEKAVNATTERLFSEPLDHRGEVVLVGAGPGDAGLLTLKGLQQIQQADIVVYDRLVSDDIMNLVRRDADRVFVGKRAGYHCVPQEEINQILLREAQKGKRVVRLKGGDPFIFGRGGEELETLCHAGIPFSVVPGITAASGCSAYSGIPLTHRDYAQSVRLVTGHLKTGGELDWENLAAEKQTLVFYMGLNQAATIQEKLIAFGMQADMPVALVENGTSVKQRVVHGVLTQLGELAQQVESPALIIVGRVVALRDKLNWFSNH

SEQ ID NO: 75176 - protein, 56 aa, Salmonella typhimurium
MFKFVKIAVVAGVLATLTACTGHIENKKNNCSYDYLLHPAISISKIIGGCGPAADQ

SEQ ID NO: 75177 - protein, 5559 aa, Salmonella typhimurium
MGNKSIQKFFADQNSVIDLSSLGNAKGAKVSLSGPDMNITTPRGSVIIVNGALYSSIKGNNLAVKFKDKTITGAKILGSVDLKDIQLERIDSSLVDSAQVEKKGNGKRRNKKEEEELKKQLDDAENAKKEADKAKEEAEKAKEAAEKALNEAFEVQNSSKQIEEMLQNFLADNVAKDNLAQQSDASQQNTQAKATQASKQNDAEKVLPQPINKNTSTGKSNSSKNEENKLDAESVKEPLKVTLALAAESNSGSKDDSITNFTKPQFVGSTAPNATVIIKINGIAVGQAVADSLGNFTFTAPETLTDGTYNLEAEAKTADGSGSAKLVITIDSVTDKPTFELSPESSVSGHKGLTPTLTPSIVGTAEENAKVDIYVDNKLVASVDVDKDGNWSYEFKDNELSEGENSIKVVAVDKAGNKNETTDSIITDTIAPEKPTIELDDSSDSGIKNDNITNSTLPTFIGVAEPGSTVSIYLGLKHLGEVIVAKDGTWSYTLTTPLKDGEYNITATATDIAGHTSATANLPFTIDTRISYFSAEIETTNDSGIVGDNVTNNTRPTFTGKTEPNAIISVINSETGEEVIFKANDKGEWTFNFTSDSVEGINNLTFTVEDVAGNKKDFSFSYVIDTIAPVPPTVSLEDYVVLPNGIILSGNDLPALVGTAEPKSTILLMRDGKLYDSIEVDSNGTWNYQFSNKFLQGAYDIEIISQDAAGNKSSTVKYSFTIQTEVVPPKAELDASDDSGAKGDWITNKHNALTLLGTADRFATVNILIDGKTIGVTTADADGNWNFDISRNLSDNVYKITVESIDPLGRTSSVDYQLTIDSFTPIPTVMLHDSADSGVKGDMITKINTPLFTGMAEANAKVSIYVDGVLSGEAIAGDDGVWNFQFTTALSDGSHDVTVKVEDIAGNTASSSAYNFQIVTQTQKPTIELVNDTGVDNTDHIINEKNPALTGTAAPYSTVKLYIDGALIAEVRTNKDGRWEYTLKADQGLVDGDHRITASVEDIAGNIAHSDPFLISVDTAISIPIVSLSPDSDSGISDDNLTNIVKPTLHLKDIDPDIISVQVWDAMSDTQIGVATQQPDGSWAYTFTSDLTEGLHQVYVKVEDIAGNKANSAIFDFTIDTTVSTPVISLLSKDDTGVTGDNLTNINKPGFAISGVDADAHRVVVQVMHNGVSEEIELSHLNGSWLFIPGNTWADGSYTLTVKVEDKAGNTNYSAPLTVVIDTQIAIDGVELVNDSGVKGDNMTNDDRPHFRVTVPTDVNEVRLSIDGGNSWVQATPGVAGSWEYIWPTDLADGQYTLTVEATDKAGNTVTKTIDFAVDTTLSVPVIVLDSADDTGIQGDNMTNSTQPTFALQHIDDDAVRVTVSVEHGGVTTTFDATKGTGGWTFTPPTSWADGDYTLSVSVEDKAGNTSHSASLTVTVDTQIAINNIELVNDSGIPDDNLTNNVRPHFQVTVPTDVNVVRLSIDGGKTWFNATQSATPGVWDYIWPDDVADGGYTLTVEATDEAGNKATQTLDFTIDTTLSVPTLSLDSADDSGIAGDNITNVKTPGFTLNNIDTDVSRVIVEVMHNGIKQEVPLVQTGGQWRFAPTSDWADGDYILTVKVEDRAGNVKQSAPLTVTVDTHIAIDRIELVNDSGIPGDNLTNEARPHFQVTVPADVNGVRLSIDGGKTWFDATQSATSGVWDYTWLTNVANGPHTLMVEASDKAGNKTTQKLDFTIDTILSEPTITLDSADDSAAGDNITNVKMPGFTLGNIDADVTKVVVTVAHDGKNQQIELIKNGGVWRFTPGAAWTDGDYTLTVKVEDKAGNTNYSAPLTVTIDTQTSIDRIELLNDTGIVGDNLTNEARPQFHITVPTDVNSVQLSLDGGINWVNATLTSDGVWEYIWPTDLVENTYTLTVKATDVAGNTATETLNFIIDTTLSTPTITLDSADDSGTANDNKTNVKTPGFIIGGIDSDVTQVVVQVMRDGHSEEVELTQTNGQWRFVPGSAWTDGDYTLTVTVKDEAGNIRHSAPLTVTIDTQITIDHIELVNDSGIPDDNLTNNVRPHFQVTVPTDVNVVRLSIDGGKTWFNATQSATPGVWDYTWLADVGEGKHTLTVEATDKAGNKTTQQLDFIIDTLLSEPTIVLDSTDDSGTKGDHLTNVNKPTFLLGNIDADARYVTVEVQHGGTKEVLTATKDATGNWSVTPTGTWADGDYTLTVRVEDEAGNEKHSASLTVTVDTQITIDVIELVNDNGIPGDNMTNDAHPQFRVTVPGDVNEVSLSIDGGVTWVKATQSATPGVWNYTWPGTVPDGDYTLNVKATDNAGNTVTETLHFTIDTTLSTPVIVLDSADDSGVHGDNMTNHTQPTFALQHIDDDAVRVTVSVEHGGVTTTFDATKDAGGWTFTPTGAWADGDYTLSVSVEDKAGNTSHSASLTVTVDTQIAINNIELVNDSGIPDDNLTNNVRPHFQVTVPTDVNVVRLSIDGGKTWFNATQSATPGVWDYTWLADVGEGKHTLTVEATDKAGNKTTQQLDFIIDTLLSEPTIVLDNTDDSGTKGDNLTNVNKPTFLLGNIDADARYVTVEVQHGGTKEVLTATKGATGIWSVTPTGTWADGDYTLTVRVEDDAGNVKYSAPLTVTVDTQITIDVIELVNDNGIPGDNLTNDVRPHFRVTVPGDVNEVRLSIDGGNTWVRATQGTAGIWDYTWPKDVTDGLHTLTVEATDKAGNKTTQTLDFTIDTRLSTPTIAMDSRDDTGAIGDHITSVKRPGFTIGNIDADAHSVILRITQGGNSQEVTLTQVGGQWRFTPDADWADGSYTLTVEVTDNAGNVRQSTPLVVTVDTQTSITDITLVNDHGVPDDNLTNSTRPQFEITVPADVNSVQLSIDGGANWVSATQGIEGVWGYTWPTDMGDGKHTLTVMVTDRAGNTATQTLEFFIDTRLSTPTIALDSTDDTGTPGDDMTNRTRPTFILQNIDSDVINVTVSVTHNGTTTSFTATQGAGGWSFTPPAPWGDGDYTLTVTVEDRAGNTRPSTPLTVTVDTQIAIDRIELVNDSGVPGDNVTKHVRPQFQISVPDDVEKVLLSIDGGTTWVTAIKSSTAGIWDYTWPTDMPEGQHTLTVEVTDGAGNKMTETLNFTIDITLLTPTIELAPDQDTGQNKNDNLTSVTQPVFVLGSIDKDVRHVELSIEHNGTFKTVVLTESADGWRYRPDSALADGSYTFTVTVTDVAGNQQTSAPLKVTIDGTLTTPVIELAAGEDSGTVGDRLTNHDRPVFDIHQVDSDVTRVMVKVTYNGKTHEEAAVFTNGQWRFTPSASWADGSYQLAVVVEDLAGNVKESAPFEVRIDTTTTINNIVLLNDTGVQNDQLTNVAKPSFRIDVPGDVVQVRVTLDGGANWNVIRKNADGQWIFDSPNTLVDGTYTLRVEATDEAGNIANKDLVFNIDTNIQVPTIALDAGQDTGANTADNITNISRPTFTIGNVDPDVIKVVVTIDGHDYNATKVGAGWQFTPGNAIPDGSYNITVTVEDKAGNTATSKPLPVVIDTTAEIESVTLVTDSGDSDVDNITKVDKPQFSIVTADDITHVRVKIDNAANWIELTKGGDGRWIFNVGSALPDGQHTLLVDVTDIAGNVAQETLQFTIDTTLREPTIVLDPTHDTGDDTNDNLTRINKPVFIIGNVDNDVSHIVVHIDGRDYTIENTGGNLTFTPDQPLSDGQHTISVTVTDIAGNTKTSAELRIEIDTQVQIDSVTLTTDSGVNDHDNVTNATRPSFEIATPDDVTSVLVSFDGVNWTPISKNAAGQWEFTAGSALPDGHYTLHVQATDRAGNTANSTLGFTVDTQIDGLSVVMLDDAGKDSTDGITNITSPRFEISAREPLQSVTVILNGKSSTLTQGAGNKWLFTPDTPLVDGTYKIEIVAEDIAGNKISKEVSFTIDTIVSDPSIDLLDADDTGESAVDNITSVTTPRFVIGNVPADIDTVVIRINGVSYPVTANGNNLWEFQVPVALNDGVYEAVVVFRDIAGNTSETKLPFTIDTTTSVSVRMEPASDTGNSNSDNLTNKQNPKFEGTAEPNAKLVITIVDDKSGREVLKQTITVGADGNWSVTPNILPDGMYTINVVATDVAGNTAQTQERFTIDTVTIDPTIRLSDPSIDDQHEATSLRPEFKGFAEAFSTIMIQWDGKVVGSANANANGEWSWTPPSVLAPGSYVVSIVAKDKAGNESSQVDFPVVIPVIDVTPPTIKLSEESDSGALGDFTTNNKTPTLIGSTLPNTIVSIYVDGVKVGEATADTAGRYTFQLSEMKDGHYVVQVGIVNPRDNSELRSTAVDVTIDTEVAELVWNISGMHEGGYINTVTPEIGGTSEPNSKITIFVNGVEKAIAYTTGAGHWGVVLPALGNDGNYELTFKVEDVAGNIREFGPQNVILDTVISPLTVVLREADDSGKVGDWITNKSHVTIDGTAEAGSTLTIRNPQGVVIATLVVGNDGRWSAELDLREGSNAFVVVSEDKAGNSQQKEILIEHDTQIEISDISLSRDTNSGDKYDLITNNKSPVLVAMTDPGATVQVYINGVLQGTVEASSSGNISYTMPANSADGEYQVQFVATDTAGNRVESAITTVTIDSQIAVFDIDEDSLPALSNNRALSVSGVGEAGSQVSIFVDGKLVNVVMVEADGTWRAPILLQDDGTFNIHFSITDVAGNTEVSKDYSVDVDSSTDFPTLNLEDASNSGSLDDLITNHNKPVLVGTAEAGATIHIYVDEKIVANVLVLEDGTWSYQFDNALKDGEYSIRVVAEDPAGNTAESPRLLVTIDTSTFIDNPAMVAGSDNGIFSNDSITSQTRPTFSIFGEMNQSVQIFIDGVLVDTITVTDRNQVYRPESPLGDGSHSIYYVITDKAGNTATSKTLNFTIDTFNTTPVAIDSIGGQTLAEMTGSDGKIYITDTTRNLLFSGSAEPNSKIEIIINGLNVGEVWVNEKGHWQMPVNPLYFTEGQLDITVKSTDRAGNVNQEKYSIWVDTHIKVFTSELDDNKSSSKTEWWSNSDLITMRGTGEIGATVSLIVAGVTLATAVVAATGRWELSTDKLPEGTYDISLVIEDSAGNRWEDVREIFIDRTPPNAPVVTYSDIVNDLIIMQGTAEAKSQLIITDSEGNTYTLTVPDNGKWSMAIPYPSEGKFTITSVDAIGNRSDDVPLDIMKEVPVISLSPDSDSGTVGDNITRDKQPTFIIGNLESDVVVVQVDINGTVYNAEKNADGVWFFTPGTPLADGSYTISVIASDAAGNQKNSLPITVTIDSTLTVPEIALAAGEDNGASDSDNVTNHTQPKFTLQHIDADVTGVTVNVTHNGVTDIYQATQGADGWTFTPPAAWNDGNYTLSVTVVDRAGNSQQSASLAVTVDSTVTVTADSQHDDASDDATATAVTPPESETVNAESATHLRTEPSAAEESVVKVTAYSITLLNADSGDEIDRSISQTPSFEISVPENIVNVSIMFEGEEFTLPITNQKAIFEVPLSLEDGEYTMDVKFIDKDNDFLIKEKTFSVDHSSADIVNAMNVRGKTEDDINDSPSTSSVGHNNNGAIDVFAVNEVTLPVDNQEEHA

SEQ ID NO: 75178 - protein, 163 aa, Salmonella typhimurium
MRRILSVLLENESGALSRVIGLFSQRGYNIESLTVAPTDDPTLSRMTIQTVGDEKVLEQIEKQLHKLVDVLRVSELGQGAHVEREIMLVKIQASGYGREEVKRNTEIFRGQIIDVTPTLYTVQLAGTSDKLDAFLASLRDVAKIVEVARSGVVGLSRGDKIMR

SEQ ID NO: 75179 - protein, 152 aa, Salmonella typhimurium
MFRGATLVNLDSKGRLTVPTRYREQLIESATGQMVCTIDIHHPCLLLYPLPEWEIIEQKLSRLSSMNPVERRVQRLLLGHASECQMDGAGRLLIAPVLRQHAGLTKEVMLVGQFNKFELWDETTWYQQVKEDIDAEQSATETLSERLQDLSL

SEQ ID NO: 75180 - protein, 313 aa, Salmonella typhimurium
MMENFKHTTVLLDEAVNGLNIRPDGIYIDGTFGRGGHSRLILSQLGEEGRLLAIDRDPQAIAVAQTINDPRFSIIHGPFSALADYVAERELTGKIDGILLDLGVSSPQLDDAERGFSFMRDGPLDMRMDPTRGQSAAEWLQTAEEADIAWVLKTFGEERFAKRIARAIVERNREQPMTRTKELAEVVAAATPVKDKFKHPATRTFQAVRIWVNSELEEIEQALKSSLSVLAPGGRLSIISFHSLEDRIVKRFMREQSRGPQVPAGLPMTEAQLKKLGGRELRALGKLMPGEKEVAENPRARSSVLRIAERTNA

SEQ ID NO: 75181 - protein, 588 aa, Salmonella typhimurium
MKAAAKTQKSKRQEEQTNFISWRFALLCGCILLALVFLLGRAAWLQIIAPDMLVRQGDMRSLRVQEVSTSRGMITDRSGRPLAVSVPVKAIWADPKEVHDAGGISVGDRWKALSTALNIPLDQLSARINANPKGRFIYLARQVNPDMADYIKKLKLPGIHLREESRRYYPSGEVTAHLIGFTNVDSQGIEGVEKSFDKWLTGQPGERIVRKDRYGRVIEDISSTDSQAAHNLALSIDERLQALVYRELNNAVAFNKAESGSAVLVDVNTGEVLAMANSPSYNPNNLAGTPKDAMRNRTITDVFEPGSTVKPMVVMTALQRGIVNENTVLNTVPYRINGHEIKDVARYSELTLTGVLQKSSNVGVSKLALAMPSSALVDTYSRFGLGKATNLGLVGERSGLYPQKQRWSDIERATFSFGYGLMVTPLQLARVYATIGSYGIYRPLSITKVDPPVPGERIFPESTVRTVVHMMESVALPGGGGVKAAIKGYRIAIKTGTAKKVGPDGRYINKYIAYTAGVAPASQPRFALVVVINDPQAGKYYGGAVSAPVFGAIMGGVLRTMNIEPDALATGEKNEFVINQGEGTGGRS

SEQ ID NO: 75182 - protein, 495 aa, Salmonella typhimurium
VADRNLRDLLAPWVAGLPARELREMTLDSRVAAAGDLFVAVVGHQADGRRYIPQAIAQGVAAIIAEAKDEASDGEIREMHGVPVVYLSQLNERLSALAGRFYHEPSENMRLVAVTGTNGKTTTTQLLAQWSQLLGETSAVMGTVGNGLLGKVIPTENTTGSAVDVQHVLASLVAQGATFGAMEVSSHGLVQHRVAALKFAASVFTNLSRDHLDYHGDMAHYEAAKWMLYSTHHHGQAIVNADDEVGRRWLASLPDAVAVSMEGHINPNCHGRWLKAEAVEYHDRGATIRFASSWGEGEIESRLMGAFNVSNLLLALATLLALGYPLTDLLKTAARLQPVCGRMEVFTAPGKPTVVVDYAHTPDALEKALQAARLHCAGKLWCVFGCGGDRDKGKRPLMGAIAEEFADIVVVTDDNPRTEEPRAIINDILAGMLDAGQVRVMEGRAEAVTNAIMQAKDNDVVLIAGKGHEDYQIVGTQRLDYSDRVTAARLLGVIA

SEQ ID NO: 75183 - protein, 452 aa, Salmonella typhimurium
MISVTLSKIADVLGAEHRGADLTLDTVITDTRKVTPGCLFVALKGERFDAHDFADKAKANGAGALLVSRPLDIDLPQVIVKDTRQAFGQLAAWVRMQVPARVVALTGSSGKTSVKEMTAAILSQCGNTLYTAGNFNNDIGVPITLLRLNHDYDYAVIELGANHQGEIAWTVSLTRPEAALVNNLAAAHLEGFGSLAGVAKAKGEIYTGLPENGIAIMNADNNDWLNWQSIIGDRLVWRFSPNAANSDFTAANIHVTSHGTEFTLQTPMGSIDVLLPLPGRHNIANALAAAALSMAVGATLTAIKAGLAALKAVPGRLFPIQLSENQLVLDDAYNANVGSMTAAVQVLSEMPGYRVLVVGDMAELGAESEACHLQVGEAAKAAGIDRVLSTGKLSQAISHASGVGEHFADKAALIARLHALLQEQPMMTILVKGSRSAAMEDVVHALQEKGSC

SEQ ID NO: 75184 - protein, 548 aa, Salmonella typhimurium
MEIFFTILIMTLVVSLSGVFTRVLPFQLPLPLMQIAVGALLAWPTFGLHVEFDPELFLVLFIPPLLFADGWKTPTREFLEHGREIFGLALALVLVTVVGIGFLIYWLVPGIPLIPAFALAAVLSPTDAVALSGIVGEGRIPKKIMGILQGEALMNDASGLVSLKFAVAVAMGTMVFTVGGATLEFFKVAIGGILAGFVVSWLYGRSLRFLSRWGGDEPATQIVLLFLLPFASYLIAEHIGVSGILAAVAAGMTITRSGVMRRAPLAMRLRANSTWAMLEFVFNGMVFLLLGLQLPGILESSLAAAEADPNVETWMLFTDIVLIYAALMLVRFGWLWTMKKFSLRFLKKKPMEFASWTSREILIASFAGVRGAITLAGVLSIPLLLPDGSGFPARYELVFLAAGVILFSLFVGVIMLPLLLQHLEVADHAQQLKEERIARAATAEVAIVAIQKMEERLAADTEENIDNQLLTEVSSRVIGNLRRRADGRNDVESSIQEENLERRFRLAALRSERAELYHLRATREISNETLQKLLHDLDLMEALLIENQ

SEQ ID NO: 75185 - protein, 858 aa, Salmonella typhimurium
MTLNGKSPVKFVKYLLILAVCCILLGAGSIYGLYRYIEPQLPDVATLKDVRLQIPMQVYSADGELIAQYGEKRRIPVTLDQIPPEMINAFIATEDSRFYEHHGIDPVGIFRAASVALFSGHASQGASTITQQLARNFFLSPERTLMRKIKEAFLAIRIEQLLNKNEILELYLNKIYLGYRAYGVGAAAQVYFGKTVDQLSLSEMAVIAGLPKAPSTFNPLYSMDRAIARRNVVLSRMLSEGYITQAQYDQARSEPIDANYHAPEIAFSAPYLSEMVRQEMYNRYGESAYEDGYRIYTTITRKVQQAAQQAVRNNVLDYDMRHGYRGPANVLWKVGETAWDSKKITDTLKALPTYGPLLPAVVTSANPQEATAALADGTSVSLHMEGMRWARPYRSDTQQGPTPRKVTDVVQTGQQIWVRQVDNDWWLAQVPEVNSALVSLNPQTGAVLALVGGFDFNQSKFNRATQALRQVGSNIKPFLYTAAMDKGLTLASMLNDVPISRWDAGAGSDWRPKNSPPQYAGPIRLRQGLGQSKNVVMVRAMRAMGVDYAAEYLQRFGFPAQNIVHTESLALGSASFTPMQVARGYAVMANGGFLIDPYFISKIENDQGGVIFEAKPKIACPECDIPVIYGNTQKSDVLENTNVEEVAVSQEQQNSAVPMPELEQANQALVAQNGTQEYAPHVINTPLAFLIKSALNTNIFGEPGWMGTGWRAARDLKRRDIGGKTGTTNSSKDAWFSGYGPGVVTSVWIGFDDHRRDLGRTTASGAIKDQISGYEGGAKSAQPAWDAYMKAVLEGVPEQPLTPPPGIVTVNIDRSTGQLASGGNSREEYFIEGTQPTQQAVHEVGTTIIDNGETHELF

SEQ ID NO: 75186 - protein, 360 aa, Salmonella typhimurium
MLVWLAEHLVKYYSGFNVFSYLTFRAIVSLLTALFISLWMGPRMIARLQKLSFGQVVRNDGPESHFSKRGTPTMGGIMILTSIVISVLLWAYPSNPYVWCVLVVLIGYGIIGFVDDYRKVVRKDTKGLIARWKYFWMSVIALGVAFALYLVGKDTPATQLVVPFFKDVMPQLGLFYILLSYFVIVGTGNAVNLTDGLDGLAIMPTVFVAAGFALVAWATGNMNFANYLHIPYLRHAGELVIVCTAIVGAGLGFLWFNTYPAQVFMGDVGSLALGGALGIIAVLLRQEFLLVIMGGVFVVETLSVILQVGSFKLRGQRIFRMAPIHHHYELKGWPEPRVIVRFWIISLMLVLIGLATLKVR

SEQ ID NO: 75187 - protein, 438 aa, Salmonella typhimurium
MADYQDKNVVIIGLGLTGLSCVDFFLARGVTPRVMDTRVTPPGLDKLPQEVERHVGGLNDEWLLAADLIVASPGIALAHPSLSAAASAGVEIVGDIELFCREAQAPIVAITGSNGKSTVTTLVGEMAKAAGVNVGVGGNIGLPALMLLDADRELYVLELSSFQLETTSSLQAAAATVLNVTEDHMDRYPFGLQQYRAAKLRVYEKAKVCVVNADDALTMPVRGADERCVSFGVNMGDYHLNRQQGETWLRVKGEKVLNVKEMKLSGQHNYTNALAALALADAVGLPRASSLKALTTFTGLAHRFQLALEHNGVRWINDSKATNVGSTEAALNGLHVDGTLHLLLGGDGKSADFSPLTRYLTGDRIRLYCFGRDGAQLAALRPEIAQQTETMEEAMRLLAPRVQPGDMVLLSPACASLDQFKNFEQRGDVFTRLAKELG

SEQ ID NO: 75188 - protein, 414 aa, Salmonella typhimurium
MRLSLPRLRMPRVPGFGLLAWLFAALKGWVMASRDKDADSLIMYDRTLLWLTFGLAAIGFVMVTSASMPVGQRLANDPFLFAKRDALYIFLAFCLAMVTLRLPMTFWQKYSTTMLIASIIMLLIVLVVGSSVNGASRWIALGPLRIQPAEFTKLSLFCYLANYLVRKVDEVRNNLRGFLKPMGVILVLAVLLLAQPDLGTVVVLFVTTLAMLFLAGAKLWQFIAIIGMGISAVILLILAEPYRIRRVTSFWNPWEDPFGSGYQLTQSLMAFGRGEIWGQGLGNSVQKLEYLPEAHTDFIFAIIGEELGYIGVVLALLMVFFVAFRAMSIGRKALEIDHRFSGFLACSIGIWFSFQALVNVGAAAGMLPTKGLTLPLISYGGSSLLIMSTAIMFLLRIDYETRLEKAQAFTRGSR

SEQ ID NO: 75189 - protein, 355 aa, Salmonella typhimurium
MSGQPKRLMVMAGGTGGHVFPGLAVAHHLMAQGWQVRWLGTADRMEADLVPKHGIDIDFIRISGLRGKGVKALLAAPLRIFNAWRQARAIMKRFKPDVVLGMGGYVSGPGGLAAWSLGIPVVLHEQNGIAGLTNQWLAKIATTVMQAFPGAFPNAEVVGNPVRTDVLALPLPQVRLAGRDGPIRVLVVGGSQGARVLNQTMPQVAARLGDTVTIWHQSGKGAQLTVEQAYAGAGQPQHKVTEFIDDMAAAYAWADVVVCRSGALTVSEIAAAGLPAIFVPFQHKDRQQYWNALPLENAGAAKIFEQPQFTVEAVADTLAGWSREALLTMAERARAVSIPDATERVASEVSRVART

SEQ ID NO: 75190 - protein, 491 aa, Salmonella typhimurium
MNTQQLAKLRSIVPEMRRVRHIHFVGIGGAGMGGIAEVLANEGYQISGSDLAPNPVTQQLTSLGATIFFNHRPENVRDASVVVVSSAISADNPEIVAAHEARIPVIRRAEMLAELMRFRHGIAIAGTHGKTTTTAMVSSIYAEAGLDPTFVNGGLVKAAGVHARLGHSRYLIAEADESDASFLHLQPMVAIVTNIEADHMDTYHGDFENLKQTFINFLHNLPFYGRAVMCVDDPVIRELLPRVGRQTTTYGFSEDADVRVEDYQQIGPQGHFTLLRQGMPDLHVTLNAPGRHNALNAAAAVAVATEEGIADDAILRALESFQGTGRRFDFLGEFPLEPVNGKAGTAMLVDDYGHHPTEVDATIKAARAGWPDKNLVMLFQPHRYTRTRDLYDDFANVLTQVDALLMLDVYPAGEAPIPGADSRSLCRTIRNRGKIDPILVSDPAQVATMLAPVLTGNDLILVQGAGNVGKIARYLSEIKLKPQIQEEEQHG

SEQ ID NO: 75191 - protein, 306 aa, Salmonella typhimurium
MADKIAVLLGGTSAERDVSLNSGAAVLAGLREGGINAHPVDPQEVDVAQLKAMGFQKVFIALHGRGGEDGTLQGMLELLGLPYTGSGVMASALSMDKLRSKLLWQGAGLPVAPWVALTRAEFEKGLSEEQKARISALGLPLIVKPSREGSSVGMTKVVEENALQGALSLAFQHDDEILIEKWLCGPEFTVAIVGEEILPSIRIQPAGTFYDYEAKYLSDETQYFCPAGLDASQEAALQSLVLQAWKALGCTGWGRIDVMLDSDGQFYLLEANTSPGMTSHSLVPMAARQAGMSFSQLVVRILELAD

SEQ ID NO: 75192 - protein, 276 aa, Salmonella typhimurium; identical to SEQ ID NO: 73038

SEQ ID NO: 75193 - protein, 420 aa, Salmonella typhimurium
MIKATDRKLVVGLEIGTAKVAALVGEVLPDGMVNIIGVGSCPSRGMDKGGVNDLESVVKCVQRAIDQAELMADCQISSVYLALSGKHISCQNEIGMVPISEEEVTQEDVENVVHTAKSVRVRDEHRVLHVIPQEYAIDYQEGIKNPVGLSGVRMQAKVHLITCHNDMAKNIVKAVERCGLKVDQLIFAGLAASYSVLTEDERELGVCVVDIGGGTMDIAVYTGGALRHTKVIPYAGNVVTSDIAYAFGTPPSDAEAIKVRHGCALGSIVGKDESVEVPSVGGRPPRSLQRQTLAEVIEPRYTELLNLVNEEILQLQEQLRQQGVKHHLAAGIVLTGGAAQIEGLAACAQRVFHTQVRIGAPLNITGLTDYAQEPYYSTAVGLLHYGKESHLNGEAEVEKRVTASVGSWIKRLNSWLRKEF

SEQ ID NO: 75194 - protein, 383 aa, Salmonella typhimurium
MFEPMELTNDAVIKVIGVGGGGGNAVEHMVRERIEGVEFFAVNTDAQALRKTAVGQTIQIGSGITKGLGAGANPEVGRNAADEDREALRAALEGADMVFIAAGMGGGTGTGAAPVVAEVAKDLGILTVAVVTKPFNFEGKKRMAFAEQGITELSKHVDSLITIPNDKLLKVLGRGISLLDAFGAANDVLKGAVQGIAELITRPGLMNVDFADVRTVMSEMGYAMMGSGVASGEDRAEEAAEMAISSPLLEDIDLSGARGVLVNITAGFDLRLDEFETVGNTIRAFASDNATVVIGTSLDPDMNDELRVTVVATGIGMDKRPEITLVTNKQVQQPVLDRYQQHGMAPLTQEQKTVAKVVNDNTPQAAKEPDYLDIPAFLRKQAD

SEQ ID NO: 75195 - protein, 305 aa, Salmonella typhimurium
MIKQRTLKRIVQATGVGLHTGKKVTLTLRPAPANTGVIYRRTDLNPPVDFPADAKSVRDTMLCTCLVNEHDVRISTVEHLNAALAGLGIDNIVIEVNAPEIPIMDGSAAPFVYLLLDAGIDELNCAKKFVRIKETVRVEDGDKWAEFRPYNGFTLDFTIDFNHPAIDSSSQRYAMNFSADAFMRQISRARTFGFMRDIEYLQSRGLCLGGSFDCAIVVDDYRVLNEDGLRFEDEFVRHKMLDAIGDLFMCGHNIIGAFTAYKSGHALNNKLLQAVLAKQEAWEFVTFQDDAELPLAFKAPSTVLA

SEQ ID NO: 75196 - protein, 133 aa, Salmonella typhimurium
MKEKSSVEVRLDKWLWAARFYKTRAMAREMIEGGKVHYNGQRSKPSKIVELNATLTLRQGNDERTVIVKAITEQRRPASEAVALYEETAESVEKREKMAQARKLNALTMPHPDRRPDKKERRDLLRFKHGDSE

SEQ ID NO: 75197 - protein, 294 aa, Salmonella typhimurium
MIMPQHDQLHRYLFENFAVRGELVTVSETLQQILDNHNYPQPVKTVLAELLVATSLLTATLKFAGDITVQLQGDGPLSLAVINGNNQQQMRGVARVQGDIPDNADLKTLVGNGYLVITITPEEGERYQGVVGLEGDTLAACLEDYFLRSEQLPTRLFIRTGDVDGKPAAGGMLLQVMPAQNAQAEDFDHLAMLTETIKSEELLTLPANDVLWRLYHEEEVTLYDPQNVEFKCTCSRERCAGALKTLPDEEVDSILAEEGEIDMHCDYCGNHYLFNAMDIAEIRNNASPADPQVH

SEQ ID NO: 75198 - protein, 538 aa, Salmonella typhimurium
MRVNNLTPQDLKAYGINDVQDIVYNPSYDTLYQEELNPGLEGYERGVLTNLGAVAVDTGIFTGRSPKDKYIVRDDTTRDTLWWSDKGKGKNDNKPLSQETWQHLKGLVTHQLSGKRLFIVDAFCGANADTRLSVRFITEVAWQAHFVKNMFIRPTDEELVGFKPDFIVMNGAKCTNPQWKEQGLNSENFVAFNLTERIQLIGGTWYGGEMKKGMFSVMNYLLPLKGIASMHCSANVGEKGDVAVFFGLSGTGKTTLSTDPKRRLIGDDEHGWDDDGVFNFEGGCYAKTIKLSKEAEPEIYHAIRRDALLENVTVREDGTVDFDDGSKTENTRVSYPIYHIDNIVKPVSKAGHATKVIFLTADFGVLPPVSRLTANQTQYHFLSGFTAKLAGTERGVTEPTPTFSACFGAAFLTLHPTQYAEVLVKRMQAAGAQAYLVNTGWNGTGKRISIKDTRAIIDAILNGSLDNAETFRLPLFDLAIPTELPGVDTHILDPRNTYASPEQWQEKATALAKLFIENFEKYTDTPAGEALVSAGPKL

SEQ ID NO: 75199 - protein, 775 aa, Salmonella typhimurium
MNDSFCRIIAGEIQANAGQVEAAVRLLDEGNTVPFIARYRKEITGGLDDTQLRNLETRLGYLRELEDRRQAILKSISEQGKLTDELAGAINATLSKTELEDLYLPYKPKRRTRGQIAIEAGLEPLADLLWNEPSHDPDVEAAKYIDGDKGVADTKAALDGARYILMERFAEDAALLAKVRDYLWKNAHLVATVVSGKEEEGAKFRDYFDHHEPIANVPSHRALAMFRGRNEGILQLSLNADPQFDEPPKESYCEQIIMDHLGLRLNNAPADSWRKGVVSWTWRIKVLMHLETELMGTVRERAEDEAINVFARNLHDLLMAAPAGLRATMGLDPGLRTGVKVAVVDGTGKLVATDTIYPHTGQAAKAATVIAALCEKYHVELVAIGNGTASRETERFYLDVQKQFPNVTAQKVIVSEAGASVYSASELAAQEFPDLDVSLRGAVSIARRLQDPLAELVKIDPKSIGVGQYQHDVSQTQLARKLDAVVEDCVNAVGVDLNTASVPLLTRVAGLTRMMAQNIVAWRDENGQFQNRQQLLKVSRLGPKAFEQCAGFLRINHGDNPLDASTVHPEAYPVVERILAATQQALKDLMGNSNELRHLKAADFTDDKFGVPTVSDIIKELEKPGRDPRPEFKTAQFADGVETMNDLLPGMILEGAVTNVTNFGAFVDIGVHQDGLVHISSLSTKFVDDPHTVVKAGDIVKVKVLEVDLQRKRIALTMRLDEQPGETAARRGGGADRAQGNRPASKAAKPRGRDAQPAGNSAMMDALAAAMGKKR

SEQ ID NO: 75200 - protein, 75 aa, Salmonella typhimurium; identical to SEQ ID NO: 73423

SEQ ID NO: 75201 - protein, 901 aa, Salmonella typhimurium
MLIKLLTKVFGSRNDRTLRRMRKAVSLINAMEPEMEKLSDDELKAKTNEFRARIEKGESVESLIPEAFAVVREASKRVFGMRHFDVQLLGGMVLNDRCIAEMRTGEGKTLTATLPAYLNALSGKGVHVVTVNDYLAQRDAENNRPLFEFLGMSVGINLPGMPAPAKREAYAADITYGTNNEYGFDYLRDNMAFSPEERVQRKLHYALVDEVDSILIDEARTPLIISGPAEDSSEMYKKVNKIIPHLIRQEKEDSDTFQGEGHFSVDEKARQVNLTERGLVLIEELLVQEGIMDEGESLYSPGNIMLMHHVTAALRAHALFTRDVDYIVKDGEVIIVDEHTGRTMQGRRWSDGLHQAVEAKEGVEIQNENQTLASITFQNYFRLYEKLAGMTGTADTEAFEFSSIYKLDTVVVPTNRPMIRKDLPDLVYMTEAEKIQAIIEDIKERTANGQPVLVGTISIEKSEVVSRELTKAGIKHNVLNAKFHANEAGIVAQAGYPAAVTIATNMAGRGTDIMLGGSWQAEVAALEAPTEEQIAQIKADWQVRHDAVLAAGGLHIIGTERHESRRIDNQLRGRSGRQGDPGSSRFYLSMEDALMRIFASDRVSGMMRKLGMKPGEAIEHPWVTKAIANAQRKVESRNFDIRKQLLEYDDVANDQRRAIYTQRNELLDVSDVSDTINSIREDVFKATIDAYIPPQSLEEMWDIPGLQERLKNDFDLEMPIAEWLDKEPELHEETLRERILAQSIEVYQRKEEVVGAEMMRHFEKGVMLQTLDSLWKEHLAAMDYLRQGIHLRGYAQKDPKQEYKRESFAMFAAMLESLKYEVISTLSKVQVRMPEEVEAMEMQRREEAERLAQMQQLSHQDDDAAVAADLAAQTGERKIGRNDPCPCGSGKKYKQCHGRLS

SEQ ID NO: 75202 - protein, 438 aa, Salmonella typhimurium
MPLVIVAIGVILLLLLMIRFKMNGFIALVLVALAVGLMQGMPLDKVIGSIKAGVGGTLGSLALIMGFGAMLGKMLADCGGAQRIATTLIAKFGKKHIQWAVVLTGFTVGFALFYEVGFVLMLPLVFTIAAAANIPLLYVGVPMAAALSVTHGFLPPHPGPTAIATIFHADMGKTLLFGTILAIPTVILAGPVYARFLKGIDKPIPEGLYSAKTFTEEEMPGFGVSVWTSLVPVILMAMRAIAEMILPKGHAFLPVAEFLGDPVMATLIAVLIAMFTFGLNRGRSMDQINDTLVSSIKIIAMMLLIIGGGGAFKQVLVDSGVDKYIASMMHETNVSPLLMAWSIAAVLRIALGSATVAAITAGGIAAPLIATTGVSPELMVIAVGSGSVIFSHVNDPGFWLFKEYFNLTIGETIKSWSMLETIISVCGLIGCLLLGMVV

SEQ ID NO: 75203 - protein, 254 aa, Salmonella typhimurium
MAYSKIRQPKLSDVIEQQLEFLILEGTLRPGEKLPPERELAKQFDVSRPSLREAIQRLEAKGLLLRRQGGGTFVQSSLWQSFSDPLVELLSDHPESQFDLLETRHALEGIAAYYAALRSTDEDKDRIRELHHAIELAQESGDLDAESEAVLQYQIAVTEAAHNVVLLHLLRCMEPMLAQNVRQNFELLYARREMLPLVSTHRTRIFEAIMAGKPEEAREASHRHLAFIEEIMLDRSREESRRERALRRLEQRKN

SEQ ID NO: 75204 - protein, 629 aa, Salmonella typhimurium
MAIEIKVPDIGTDEVEITEILVKVGDKVEAEQSLITVEGDKASMEVPSPQAGVVKEIKVSVGDKTETGALIMIFDSAEGAADAAPAKAEEKKEAAPAAAPAAAAAKDVHVPDIGSDEVEVTEVMVKVGDTVEAEQSLITVEGDKASMEVPAPFAGTVKEIKVNTGDKVSTGSLIMVFEVAGEAGAAAPAKAEAAPAAAAPAAATGVKDVNVPDIGGDEVEVTEVMVKVGDKVTAEQSLITVEGDKASMEVPAPFAGTVKEIKISTGDKVKTGSLIMVFEVEGAAPAAAPAKQEAAAPAPAAKAEKPAAPAAKAEGKSEFAENDAYVHATPLIRRLAREFGVNLAKVKGTGRKGRILREDVQAYVKDAIKRAERAPAAAGGGIPGMLPWPKVDFSKFGEVEEVELGRIQKISGANLSRNWVMIPHVTHFDKTDITDLEAFRKQQNAEAEKRKLDVKYTPVVFIMKAVAAALEQMPRFNSSLSEDGQRLTLKKYINIGVAVDTPNGLVVPVFKDVNKKSVTELSRELTTISKKARDGKLTAGEMQGGCFTISSIGGLGTTHFAPIVNAPEVAILGVSKSAMEPVWNGKEFVPRLMMPISLSFDHRVIDGADGARFITIINNMLSDIRRLVM

SEQ ID NO: 75205 - protein, 474 aa, Salmonella typhimurium
MSTEIKTQVVVLGAGPAGYSAAFRCADLGLETVIVERYNTLGGVCLNVGCIPSKALLHVAKVIEEAKALAEHGIVFGEPKTDIDKIRTWKEKVITQLTGGLAGMAKGRKVKVVNGLGKFTGANTLEVEGENGKTVINFDNAIIAAGSRPIQLPFIPHEDPRVWDSTDALELKEVPKRMLVMGGGIIGLEMGTVYHALGSEIDVVEMFDQVIPAADKDIVKVFTKRISKKFNLMLETKVTAVEAKEDGIYVSMEGKKAPAEAQRYDAVLVAIGRVPNGKNLDAGKAGVEVDDRGFIRVDKQLRTNVPHIFAIGDIVGQPMLAHKGVHEGHVAAEVIAGKKHYFDPKVIPSIAYTEPEVAWVGLTEKEAKEKGISYETATFPWAASGRAIASDCADGMTKLIFDKESHRVIGGAIVGTNGGELLGEIGLAIEMGCDAEDIALTIHAHPTLHESVGLAAEVFEGSITDLPNPKAKKK

SEQ ID NO: 75206 - protein, 865 aa, Salmonella typhimurium
VLEEYRKHVAERAAQGIVPKPLDATQMAALVELLKTPPVGEEEFLLDLLINRVPPGVDEAAYVKAGFLAAVAKGDTTSPLVSPEKAIELLGTMQGGYNIHPLIDALDDAKLAPIAAKALSHTLLMFDNFYDVEEKAKAGNEYAKQVMQSWADAEWFLSRPPLAEKITVTVFKVTGETNTDDLSPAPDAWSRPDIPLHAQAMLKNAREGIEPDQPGVVGPIKQIEALQKKGYPLAYVGDVVGTGSSRKSATNSVLWFMGDDIPNVPNKRGGGLCLGGKIAPIFFNTMEDAGALPIEVDVSNLNMGDVIDVYPYKGEVRNHETGELLATFELKTDVLIDEVRAGGRIPLIIGRGLTTKAREALGLPHSDVFRQAKDVAESSRGFSLAQKMVGRACGVKGIRPGAYCEPKMTSVGSQDTTGPMTRDELKDLACLGFSADLVMQSFCHTAAYPKPVDVTTHHTLPDFIMNRGGVSLRPGDGVIHSWLNRMLLPDTVGTGGDSHTRFPIGISFPAGSGLVAFAAATGVMPLDMPESVLVRFKGKMQPGITLRDLVHAIPLYAIKQGLLTVEKKGKKNIFSGRILEIEGLPDLKVEQAFELTDASAERSAAGCTIKLNKEPIVEYLTSNIVLLKWMIAEGYGDRRTLERRIQGMEKWLADPQLLEADADAEYAAVIDIDLADIKEPILCAPNDPDDARLLSDVQGEKIDEVFIGSCMTNIGHFRAAGKLLDNHKGQLPTRLWVAPPTRMDAAQLTEEGYYSVFGKSGARIEIPGCSLCMGNQARVADGATVVSTSTRNFPNRLGTGANVFLASAELAAVAALIGKLPTPEEYQTYVAQVDKTAVDTYRYLNFDQLSQYTEKADGVIFQTAV

SEQ ID NO: 75207 - protein, 423 aa, Salmonella typhimurium
MKMIVIADDFTGSNDTGVQLAKKGARTEVMLSASQKPSRRADVLVINTESRAMPADQAASAVYAALSPWCETSPAPLVYKKIDSTFRGNIGAEVTAAMRASQRKLAVIAAAIPAAGRTTLEGKCLVNGVPLLETEFASDPKTPIVSSRIAEIVALQSEIPVYEVFLQDVRRGGLSALLTAYAAEGEGIIVVDAVEERDLTLIAQAACEQPSMPLLVGAAGLANALPVELFMQDRQRLPVLVVAGSMSEATRRQVDNALCRGRAEVVDIDAARMVSDSAEQEIASVVEQACALLSQHRHTILRTSRRAEDRQLIDALCEKSAMSRQQLGERLSQRLGVVTLNIIEQARIGGLFLTGGDIATAVAGALGAEGYRIQSEVAPCIPCGTFVNSEIDDLPVITKAGGFGSDSTLCDALYYIEEMYCGD

SEQ ID NO: 75208 - protein, 265 aa, Salmonella typhimurium
MIKWPWKAQEITQNEDWPWDDALAIPLLVNLTAQEQARLIALAERFLQQKRLVALQGFELDSLKSARIALIFCLPILELGIEWLDGFHEVLIYPAPFVVDDEWEDDIGLVHSQRVVQSGQSWQQGPIILNWLDIQDSFDASGFNLIIHEVAHKLDMRNGDRASGIPFIPLRDVAGWEHDLHAAMNNIQDEIDLVGESAASIDAYAATDPAECFAVLSEYFFSAPELFAPRFPALWQRFCQFYRQDPSQRLRVSAAEGDYGEESEH

SEQ ID NO: 75209 - protein, 301 aa, Salmonella typhimurium
MTQITKFHGVFPPVPTIVNAQGELDKVGMATLLDHLIASKVNGVLLLGSGGEFCHMTNALRLETAEFCVRHINRRIPVLLGISSTSTQEVIEYGQHADRLEVDAVLVLNPYYARLTDEYIYHHFKTVANNIKSPVILYNFPALTGQDLSVDLITRLAQDHPNIIGIKDTVDNISHIREIINNVRPVRPDFVIFSGYDEYMMDTLILGGNGGIPATANFAPQLTCGIYRAWCEKEYETMFGLQRRLSALSTIYSLDSPFFGIIKKAIQLSGVDISTHVMPPVLPANEEHISNLKQILQRAGL

SEQ ID NO: 75210 - protein, 301 aa, Salmonella typhimurium
MRYDISRDAICYGFFMRLLKRVIVVVLLGVILFMVRDDIRYVYQLILKYGDKPSALALSSYKAVIQQKPVAGVKSNLSGLTYSAEDRMLFAVINNPPELVWLTTEGQLVGRMPLQGIHDPESIAWSGGNQFQIGSEKDGAVYKTQVDIQRGTMQIISMVKLEGYDKAKNKGLEGTAWDAKNERLYAAKERKPIMIKEVEMSKNGITRALPSAITASVSDVSGLEYHAPTDSLLVLSDESKMILEVSSEWRVRDRLFLTAEWSGLRDDIPQPEGIAMDNENNLYIVSEPNLFYKFSCDIQND

SEQ ID NO: 75211 - protein, 308 aa, Salmonella typhimurium
MTIALELQQLKKTYPGGVQALRGIDLQVEAGDFYALLGPNGAGKSTTIGIISSLVNKTSGRVNVFGYDLEKDVVNAKRQLGLVPQEFNFNPFETVQQIVVNQAGYYGVEHKEAVLRSEKYLKQLDLWEKRHERARMLSGGMKRRLMIARALMHEPKLLILDEPTAGVDIELRRSMWGFLKDLNAKGTTIILTTHYLEEAEMLCRNIGIIQHGELVENTSMKNLLSKLKSETFILDLAPKSPLPKLTGYQYRLVDTSTLEVEVLREQGVNSVFSQLSEQGVQVLSMRNKANRLEELFVSLVHEKQGDRA

SEQ ID NO: 75212 - protein, 344 aa, Salmonella typhimurium
MKGFLQTVTGPVAHTDMGLTLPHEHLFNDLSSVVDEPHYAFSQQLVGKKVSADLQWGLKHDPYCCADNMDRKEIDDVIFEINNFMSLGGRTIVDATGSESIGRDASALREVALKTGLNIVASSGPYLEKFESTRIHKPVELLASLIDKELNQGIGETDIRAGMIGEIGVSPAFTQAERNSLRAASLAQCNNPHTAMNIHMPGWLRLGDEVLDIVLEEMNVSPAKVSLAHSDPSGKDVVYQRKMLDRGVWLEFDMIGLDITFPKEGVAPGVQETADAVANLIALGYADQIVLSHDVFLKQMWAKNGGNGWGFVPNVFLAYLAARGVDNDTLRKLCIDNPARLLTA

SEQ ID NO: 75213 - protein, 328 aa, Salmonella typhimurium
MILMNALTAVKANTDDLAQRHTGFTLAPSAQSPRLLALTFTADTTKQFLHQVAQWPVQALEYKSFLRFKIGKILDDLCGNQLQPLLIKTLLNRAQGALLISAEGIDDVAQAEEMVKLATAVAHLIGRSNYDAMSGQYYARFVVKNVDNSDSYLRQPHRVMELHNDGTYVEEVTDYVLMMKIDEQNMEGGNSLLLHLDDWEHLESFFTHPLARRVMRWAAPPSKNVSHDVWHPVFDVDQQGRPVMRYIDQFVQPKDFEEGVWLSELSDALETSQNILSVPVPVGKFLLINNLFWLHGRDRFTPHPDLRRELMRQRGYFAYAASHYQTHQ

SEQ ID NO: 75214 - protein, 824 aa, Salmonella typhimurium
MLQCGAKKVNPVEPFVTSLPVAAVLPELLTALKIAPQVLLSAPTGAGKSTWLPLQLLQQGPVAGKILLLEPRRLAARNVAQRLAEALNEKPGETVGYRMRAQSCVGPRTRLEVVTEGVLTRMIQRDPELRGVGLVILDEFHERSLQADLALALLLDIQQGLRDDLRLLIMSATLDNDRLCQRLPDAPTIVSEGRAFPVERRYQPLAAHLRFDEAVAMATAELLRNENGSLLLFLPGVGEIQRVHEHLASRVGSDVLLCPLYGALSLEAQRKAIVPAPAGMRKVVLATNIAETSLTIEGIRLVVDSAQERVARFDARTGLTRLVTQRISQASMTQRAGRAGRLAPGICLHLLAKEQAERAAAQSDPEILHSDLSGLLMEVLQWGCHDPASLFWLDRPPEVNLQAARRLLLMLGALEGERLSARGRKMAAMGNDPRLAAMLVNAGEGDSAATAAMLAAILEDPPRGGGTDLSVVFSRRQPGWQQRSQQLLKRLQVRNGEPDSALIMPLLARAFSDRIARRRGQEGRYQLANGMGAMLDADDALGRHEWLIAPLLLQGSASPDARILLAQPLDIASLIQACPDLLRQSDTVEWDEAQGTLKAWRRMRIGQLTVSVQPLAKPSEEELHQAMLNGIRDKGLSVLNWTPEAEQFRLRLHCAAKWLPEYDWPAVDEASLLATLENWLLPHMTGVQSLRGLKSLNVNQALRGLLDYAMLQRLDSELPGHYTVPTGSRITIRYHEDNPPALAVRMQEMFGEAKTPTIAQGRVPLVLELLSPAQRPLQITRDLSAFWQGAYREVQKEMKGRYPKHVWPDDPANTAPTRRTKKYS

SEQ ID NO: 75215 - protein, 840 aa, Salmonella typhimurium
MAGNDREPIGRKGKPSRPVKQKVSRRRQHDDDYDDDYEDEEPMPRKGKGKGRKPRGKRGWLWLLLKLFIVFVVLFAIYGVYLDQKIRSRIDGKVWQLPAAVYGRMVNLEPDMPVSKNEMVKLLEATQYRLVTKMTRPGEFTVQANSIEMIRRPFDFPDSKEGQVRARLTFSDGRLETIVNLDNNRQFGFFRLDPRLITMLSSPNGEQRLFVPRSGFPDLLVDTLLATEDRHFYEHDGISLYSIGRAVLANLTAGRTVQGASTLTQQLVKNLFLSSERSYWRKANEAYMALIMDARYSKDRILELYMNEVYLGQSGDNEIRGFPLASLYYFGRPVEELSLDQQALLVGMVKGASIYNPWRNPKLALERRNLVLRLLQQQKIIDQELYDMLSARPLGVQPRGGVISPQPAFMQMVRQELQAKLGDKIKDLSGVKIFTTFDSVAQDAAEKAVVEGIPALKKQRKLSDLETAMVVVDRFSGEVRAMVGGAEPQYAGYNRAMQARRSIGSLAKPATYLTALSQPNLYRLNTWIADAPISLRQPNGQVWSPQNDDRRYSESGKVMLVDALTRSMNVPTVNLGMALGLPAVTDTWTKLGVPKDQLNPVPAMLLGALNLTPIEVAQAFQTIASGGNRAPLSALRSVIAEDGKVLYQSYPQAERAVPAQAAYLTLWTMQQVVQRGTGRQLGAKYPGLHLAGKTGTTNNNVDTWFAGIDGSQVTITWVGRDNNQPTKLYGASGAMAIYQRYLANQTPTPLVLTPPEDVVDMGVDYDGNFVCSGGMRTLPVWTDDPNTLCQQGEMMQQQQQPSGNPFDQSSQPQQPAQQQPPKEEKSDGVAGWIKEMFGGN

SEQ ID NO: 75216 - protein, 729 aa, Salmonella typhimurium
MARLKTAQPNSSLRKIAVVVATAVSGMSVYAQAAVQPKEETITVTAAPAAQESAWGPAPTIAAKRSATTTKTDTPIEKTPQSVSVVTNEEMQMHQFQSVKEALGYTPGVTVSSRGASNTYDFVIIRGFSSVGLSQNNYLDGLKLQGNFYNDAVIDPYMLERVELMRGPTSVLYGKSNPGGIISMVSKRPTTEPLKEIQFKMGTDNLFQTGFDFSDSLDDNGEFSYRLTGLARSTNEQQKSSESQRYAIAPSFTWRPDEKTNFTFLSYFQNEPETGYYGWLPKEGTVEPLPNGKRLPTDFNEGASNNTYSRNEKMVGYSFEHGFNDTFTVRQNLRFVEMKTAQKSVYGTGIAADGHTLNRGTIVDNERLQNFSVDTQLESKFATGDIDHTLLTGVDFMRMRNDINATFGSAPSIDLYNNYHPEYFAFGGAEPYQMNESKQTGLYVQDQAEWNKWVFTLGGRYDWSKQATTVRQNSTTPTEGYIERNDHQFTWRGGVNYVFDNGISPYFSYSQSFEPSAFDLWSTPRVSYKPSKGEQYEAGVKYVPKDMPVVVTGAVYQLTKTNNLTADPTNPLAQVPAGEIRARGVELEAKAALTANINMTASYTYTDAEYTKDTNLKGNTPEQVPEHMASLWGDYTFNEGPLSGLTLGTGGRFIGSSYGDPANSFKVGSAAVMDAVVKYDLARFGMAGSSIAVNVNNLLDREYVASCFQTYGCFWGAERQVVATATFRF

SEQ ID NO: 75217 - protein, 482 aa, Salmonella typhimurium
MQLNDSTLFRQQAFIDGDWRDARGGDVIPVSNPANGKPLGNVPKMGAEETRDAINAANRALPAWRALTAKERANILRRWFNLMMEHQDDLARLMTLEQGKPLAEAKGEISYAASFIEWFAEEGKRIYGDTIPGHQADKRLLVIKQPIGVTAAITPWNFPSAMITRKAGPALAAGCTMVLKPASQTPFSALALAELAQRAGIPAGVFNVVTGSAGDIGGELTSNPLVRKLSFTGSTEIGRQLMEQCAKDIKKVSLELGGNAPFIVFDDADLDKAVEGALASKFRNAGQTCVCANRLYVQDGVYDRFAEKLNQAVNKLAVGDGLQADVAIGPLIDEKAVAKVQEHIADALEKGARVITGGEAHKLGGNFFQPTILADVPDNAKVAKEETFGPLAPLFRFSDEADVIRQANDTEFGLAAYFYARDLSRVFRVGEALEYGIVGINTGIISNEVAPFGGIKASGLGREGSKYGIEDYLEIKYMCIGL

SEQ ID NO: 75218 - protein, 466 aa, Salmonella typhimurium
MGQLSESHALGGGLKSRHVTMLSIAGVIGASLFVGSSVAIAEAGPAVLLAYLFAGLLVVMIMRMLAEMAVATPDTGSFSTYADKAIGPWAGYTIGWLYWWFWVLVIPLEANIAAIILNSWIPGIPVWLFSLVITLALTGSNLLSVKNYGEFEFWLALCKVIAILAFIALGATAISGFYPYAEVSGISRLWDHGGFMPNGFGAVLSAMLITMFSFMGAEIVTIAAAESDTPDKHIVRATNSVIWRISIFYLCSIFVVVALIPWNMPGLKSVGSYRSVLELLHIPHAKFIMDCVILLSVTSCLNSALYTASRMLYSLSRRGDAPAIMGKTNRSKTPWVAVLLSTGAAFLTVIVNYYAPAKVFKFLIDSSGAIALLVYLVIAISQLRMRKILLAQGGEIKLKMWLYPWLTWLVIGFICFVLVVMLFRPAQQLEVISTGLLGLGIIGTVPIMSRWKKLIRWQKAPLQNLR

SEQ ID NO: 75219 - protein, 99 aa, Salmonella typhimurium; identical to SEQ ID NO: 73297

SEQ ID NO: 75220 - protein, 265 aa, Salmonella typhimurium
MQENHIHSDTTFALRSVAFRVPGRTLLHPLSLTFPAGRVTGLIGHNGSGKSTLLKMLGRHQPPSEGDILLDNQPLASWSSKAFARKVAYLPQQLPQAEGMTVRELVAIGRYPWHGALGRFGVADREKVDEAITLVGLKPLAHRLVDSLSGGERQRAWIAMLVAQDSRCLLLDEPTSALDIAHQVDVLALVHRLSQQRGLTVVAVLHDINMAARYCDYLVALRGGEMIAQGTPAELMRSDTLEQIYGIPMGILPHPAGAAPVSFVY

SEQ ID NO: 75221 - protein, 296 aa, Salmonella typhimurium
MRDLYPLTRRRLLTAMALSPLLWQMNTAQAAAIDPRRIVALEWLPVELLLALGITPYGVADVPNYKLWVSEPPLPDSVIDVGLRTEPNLELLTEMKPSFMVWSAGYGPSPEKLARIAPGRGFDFSDGKKPLAVARRSLVELAQTLNLEAAAEKHLAQYDRFIASQKPHFIRRGGRPLLMTTLIDPRHMLVLGPNCLFQEVLDEYGIVNAWQGETNFWGSTAVSIDRLAMYKEADVICFDHGNNTDMNALMATPLWQAMPFVRAGRFHRVPAVWFYGATLSTMHFVRILNNVLGGKA

SEQ ID NO: 75222 - protein, 685 aa, Salmonella typhimurium
VSRKREMPDGGAKSVLSDLRFGRFVGRIRRSRHPALLLLALFVAACWLTWVNFSVALPRSQWQQAIWSPDIDIIEQMIFHYSQLPRLAISLLVGAGLGLVGVLFQQVLRNPLAEPTTLGVATGAQLGITVTTLWAIPGALTTQFAALTGACIVGALVFGVAWGKRLSPVTLILAGLVVSLYCGAINQLLVIFHHDQLQSMFLWSTGTLTQTDWSGVQRLWPQLLGGVMLTLLLLRPMTLMGLDDGVARNLGLALSLARLAALSLAIVLSALLVNAVGIIGFIGLFAPLLAKMLGARRLLARLMLAPLIGALILWLSDQIILWLTRVWMEVSTGSVTALIGAPLLLWLLPRLKSMSAPDMNASDRVAAERRHVLAFAVAGGALLLLATWVALSFGRDAHGWTWASGTLLEELMPWRWPRILAALMAGVMLAVAGCIIQRLTGNPMASPEVLGISSGAAFGVVLMLFLVPGNAFGWLLPAGSLGAAATLLIIMIAAGRGGFSPQRMLLAGMALSTAFTMLLMMLQASGDPRMAEVLTWLSGSTYNATGGQVTRTAIVMVILLAIVPLCRRWLTILPLGGDAARAVGMALTPSRIALLALAACLTATATMTIGPLSFVGLMAPHIARMLGFRRTMPHMVISALAGGVLLVFADWCGRMALFPYQIPAGLLSSFIGAPYFIYLLRKQSR

SEQ ID NO: 75223 - protein, 250 aa, Salmonella typhimurium
MMSLKRYNLAAVLLLLLGGYGSAQAAIAPDRTRLVFRGEDKSISVDLKNANSKLPYLAQSWVEDEKGVKITSPLIVVPPVQRIEPSAIGQVKIQGMPALASLPQDRETLFYYNVREIPPQSDKPNTLQIALQTRIKVFYRPQALSKIDMQHPWQYKITLQRQGNGYQVSNTTGYYVVLSNASNRMDGTPARGFSPLVIAPKSNVTLGGDASELGHSPVLTYVNDYGARLPLIFNCTDNSCAVDEAKSRKS

SEQ ID NO: 75224 - protein, 136 aa, Salmonella typhimurium
MSALVYFSSSSENTHRFMQRLGLPATRIPLNERERIQVDEPYILVVPSYGGGGMAGAVPRQVIRFLNDEHNRARIRGVIASGNRNFGDAWGCAGDVIAQKCGVPWLYRFELMGTQRDIDNVRKGVNEFWQQLPRSA

SEQ ID NO: 75225 - protein, 714 aa, Salmonella typhimurium
LATTTPERVMQETMDYHALNAMLNLYDKAGHIQFDKDQQAIDAFFATHVRPHSVTFASQHERLGTLVREGYYDDAVLARYDRAFVLRLFEHAHASGFRFQTFLGAWKFYTSYTLKTFDGKRYLEHFEDRVTMVALTLAQGDETLATQLTDEMLSGRFQPATPTFLNCGKQQRGELVSCFLLRIEDNMESIGRAVNSALQLSKRGGGVAFLLSNLREAGAPIKRIENQSSGVIPVMKMLEDAFSYANQLGARQGAGAVYLHAHHPDILRFLDTKRENADEKIRIKTLSLGVVIPDITFRLAKENAQMALFSPYDIQRRYGKPFGDIAISERYDELIADPHVRKTYINARDFFQTLAEIQFESGYPYIMFEDTVNRANPIAGRINMSNLCSEILQVNSASRYDDNLDYTHIGHDISCNLGSLNIAHVMDSPDIGRTVETAIRGLTAVSDMSHIRSVPSIAAGNAASHAIGLGQMNLHGYLAREGIAYGSPEALDFTNLYFYTITWHAVHTSMRLARERGKTFAGFAQSRYASGDYFTQYLQDDWQPKTAKVRALFARSGITLPTREMWLKLRDDVMRYGIYNQNLQAVPPTGSISYINHATSSIHPIVAKIEIRKEGKTGRVYYPAPFMTNENLDMYQDAYDIGPEKIIDTYAEATRHVDQGLSLTLFFPDTATTRDINKAQIYAWRKGIKSLYYIRLRQLALEGTEIEGCVSCAL

SEQ ID NO: 75226 - protein, 319 aa, Salmonella typhimurium
MKLSRISAINWNKIQDDKDLEVWNRLTSNFWLPEKVPLSNDIPAWQTLSAAEQQLTIRVFTGLTLLDTIQNIAGAPSLMADAITPHEEAVLSNISFMEAVHARSYSSIFSTLCQTKEVDAAYAWSEENPPLQRKAQIILAHYVSDEPLKKKIASVFLESFLFYSGFWLPMYFSSRGKLTNTADLIRLIIRDEAVHGYYIGYKYQIALQKLSAIEREELKLFALDLLMELYDNEIRYTEALYAETGWVNDVKAFLCYNANKALMNLGYEALFPPEMADVNPAILAALSPNADENHDFFSGSGSSYVMGKTVETEDEDWNF

SEQ ID NO: 75227 - protein, 400 aa, Salmonella typhimurium
MAIKLEVKNLYKIFGEHPQRAFKYIEKGLSKEQILEKTGLSLGVKDASLAIEEGEIFVIMGLSGSGKSTMVRLLNRLIEPTRGQVLIDGVDIAKISDAELREVRRKKIAMVFQSFALMPHMTVLDNTAFGMELAGIAAQERREKALDALRQVGLENYAHAYPDELSGGMRQRVGLARALAINPDILLMDEAFSALDPLIRTEMQDELVKLQAKHQRTIVFISHDLDEAMRIGDRIAIMQNGEVVQVGTPDEILNNPANDYVRTFFRGVDISQVFSAKDIARRSPVGLIRKTPGFGPRSALKLLQDEDREYGYVIERGNKFVGVVSIDSLKAALSQAQGIEAALIDDPLVVDAQTPLSELLSHVGQAPCAVPVVDEEHQYVGIISKRMLLQALDREGGNNG

SEQ ID NO: 75228 - protein, 475 aa, Salmonella typhimurium
MKKTTLAMSALALSLGLALSPLSATAAETSSSAMTAQQMPSLAPMLEKVMPSVVSINVEGSTTVNTPRMPRNFQQFFGDDSPFCQDGSPFQNSPFCQGGGNGGNGGQQQKFMALGSGVIIDAAKGYVVTNNHVVDNASVIKVQLSDGRKFDAKVVGKDPRSDIALIQIQNPKNLTAIKLADSDALRVGDYTVAIGNPFGLGETVTSGIVSALGRSGLNVENYENFIQTDAAINRGNSGGALVNLNGELIGINTAILAPDGGNIGIGFAIPSNMVKNLTSQMVEYGQVKRGELGIMGTELNSELAKAMKVDAQRGAFVSQVMPNSSAAKAGIKAGDVITSLNGKPISSFAALRAQVGTMPVGSKISLGLLREGKAITVNLELQQSSQSQVDSSTIFSGIEGAEMSNKGQDKGVVVSSVKANSPAAQIGLKKGDVIIGANQQPVKNIAELRKILDSKPSVLALNIQRGDSSIYLLMQ

SEQ ID NO: 75229 - protein, 385 aa, Salmonella typhimurium
MAGWHLDTKMAQDIVARTMRIIDTNINVMDARGRIIGSGDRERIGELHEGALLVLSQGRVVDIDDAVARHLHGVRQGINLPLRLEGEIVGVIGLTGEPEHLRKYGELVCMTAEMMLEQSRLMHLLAQDSRLREELVMNLIQAEENTPALVEWAQRLGIDLNQPRVAAVVEVDSGQLGVDSAMAELQQLQNALTTPERNNLIAIVSLTEMVVLKPALNSFGRWDAEDHRKRVEQLISRMKENGQLRFRVALGNYFTGPGSIARSYRTARTTMMVGKQRMPESRSYFYQDLMLPVLLDSLRGGWQANELARPLVKLKAMDNNGLLRRTLTAWFRHNVQPLATSKALFIHRNTLEYRLNRISELTGLDLGNFDDRLLLYVALQLDEQR

SEQ ID NO: 75230 - protein, 176 aa, Salmonella typhimurium
MDSSFTPIEQMLKFRASRHEDFPYQEILLTRLCMHMQGKLLENRNKMLKAQGINETLFMALITLESQENHSIQPSELSCALGSSRTNATRIADELEKRGWIERRESDNDRRCLHLQLTEKGQAFLQEVLPPQHHCLHQLWSSLSTAEKDQLEHITRKLLTRLDQMEQEGTVLEALR

SEQ ID NO: 75231 - protein, 476 aa, Salmonella typhimurium
VTVKNDSIQSTFLFHDYETFGTHPALDRPAQFAALRTDNDFNVIGEPEVFYCKPADDYLPQPGAVLITGITPQEAREKGENEAAFARRIHALFTVPKTCVVGYNNVRFDDEVTRNIFYRNFYDPYAWSWQHDNSRWDLLDVMRACYALRPEGINWPENDDGLPSFRLEHLTRANGIEHSNAHDAMADVYATIAMAQLVKTRQPRLFDYLYSHRSKHKLAALIDVPQMKPLVHVSGMFGAWRGNTSWVAPLAWHPENRNAVIMVDLAGDISPLLELDSDTLRERLYTAKADLGDHAAVPVKLVHINKCPVLAQANTLRPEDADRLGINRQHCLDNLKVLRENPQVRDKVVAIFAEAEPFAASDNVDAQLYDGFFSDADRAAMKIVLETEPRNLPALDITFVDKRIEKLLFNYRARNFPGTLDDAEQQRWLEHRRQVLTPEFLQQYANELQMLSQQYAEDKTKLGLLKSLWQYATEIV

SEQ ID NO: 75232 - protein, 299 aa, Salmonella typhimurium
MLDNTRLRIAIQKSGRLSDDSRELLARCGIKINLHTQRLIAMAENMPIDILRVRDDDIPGLVMDGVVDLGIIGENVLEEELLNRRAQGEDPRYLTLRRLDFGGCRLSLATPVDEAWDGPAALDGKRIATSYPHLLKRYLDQKGVSFKSCLLNGSVEVAPRAGLADAICDLVSTGATLEANGLREVEVIYRSKACLIQRDGEMAQSKQELIDKLLTRIQGVIQARESKYIMMHAPSERLEEVIALLPGAERPTILPLAGEQQRVAMHMVSSETLFWETMEKLKALGASSILVLPIEKMME

SEQ ID NO: 75233 - protein, 259 aa, Salmonella typhimurium
MNQVAVVIGGGQTLGAFLCRGLAEEGYRVAVVDIQSDKAANVAQEINADFGEGMAYGFGADATSEQSVLALSRGVDEIFGRVDLLVYSAGIAKAAFISDFQLGDFDRSLQVNLVGYFLCAREFSRLMIRDGIQGRIIQINSKSGKVGSKHNSGYSAAKFGGVGLTQSLALDLAEYGITVHSLMLGNLLKSPMFQSLLPQYATKLGIKPDEVEQYYIDKVPLKRGCDYQDVLNMLLFYASPKASYCTGQSINVTGGQVMF

SEQ ID NO: 75234 - protein, 814 aa, Salmonella typhimurium
MKTKIPDAVLAAEVSRRGLVKTTAIGGLAMASSAFTLPFTRIANAAEAISPAKTGEKVVWSACTVNCGSRCPLRMHVVDGEIKYVETDNTGNDDYDGLHQVRACLRGRSMRRRVYNPDRLKYPMKRVGARGEGKFERISWDEAYDIIATNMQRLIKEYGNESIYLNYGTGTLGGTLTRSWPPGKTLVARLMNCCGGYLNHYGDYSSAQIAAGLNYTYGGWADGNSPSDIENSKLVVLFGNNPGETRMSGGGVTYYLEQARQKSNARMIIIDPRYTDTGAGREDEWIPIRPGTDAALVNGLAYVLITENMVDQPFLDKYCVGYDEKTLPASAPKNGHYKAYILGQGKDGIAKTPEWAAQITGIPADRIIKLAREIGSAKPAYICQGWGPQRHANGEIATRAISMLAILTGNVGINGGNSGAREGSYALPFERMPTLENPVETSISMFMWTDAIERGPEMTALRDGVRGKDKLDVPIKMIWNYAGNCLINQHSEINRTHEILQDDKKCEMIVVIDCHMTSSAKYADILLPDCTASEQMDFALDASCGNMSYVIFTDQAIKPRFECKTIYEMTSELAKRLGVEQQFTEGRTQEEWMRHLYEQSRKSIPNLPTFEEFRKQGIFKQRDPEGHHVAYKDFREDPQANPLTTPSGKIEIYSQALADIAATWELPEGDVIDPLPIYTPGFENYNDPLTDKFPLQLTGFHYKARVHSTYGNVDVLKAACRQEMWINPMDAQKRGINNGDKVRIFNDRGEVHIEAKVTPRMMPGVVALGEGAWYDPDAKRVDQGGCINVLTTQRPSPLAKGNPSHTNLVQVEKA

SEQ ID NO: 75235 - protein, 227 aa, Salmonella typhimurium
MTAIAPVITIDGPSGAGKGTLCKAMAEALQWHLLDSGAIYRVLALAALHHHVDLASEDALVPLASHLDVRFVSTDGNLEVILEGEDVSGEIRTQEVANAASQVAAFPRVREALLRRQRAFREAPGLIADGRDMGTVVFPDAPVKIFLDASSEERAHRRMLQLQENGFSVNFERLLAEIKERDDRDRHRAVAPLVPAADALVLDSTRLSIEQVIEKALQYARQKLALA

SEQ ID NO: 75236 - protein, 557 aa, Salmonella typhimurium
MTESFAQLFEESLKEIETRPGSIVRGVVVAIDKDVVLVDAGLKSESAIPAEQFKNAQGELEIQVGDEVDVALDAVEDGFGETLLSREKAKRHEAWITLEKAYEDAETVTGVINGKVKGGFTVELNGIRAFLPGSLVDVRPVRDTLHLEGKELEFKVIKLDQKRNNVVVSRRAVIESENSAERDQLLENLQEGMEVKGIVKNLTDYGAFVDLGGVDGLLHITDMAWKRVKHPSEIVNVGDEINVKVLKFDRERTRVSLGLKQLGEDPWVAIAKRYPEGTKLTGRVTNLTDYGCFVEIEEGVEGLVHVSEMDWTNKNIHPSKVVNVGDVVEVMVLDIDEERRRISLGLKQCKSNPWQQFAETHNKGDRVEGKIKSITDFGIFIGLDGGIDGLVHLSDISWNVAGEEAVREYKKGDEIAAVVLQVDAERERISLGVKQLAEDPFNNWVALNKKGAIVTGKVTAVDAKGATVELADGVEGYLRASEASRDRVEDATLVLSVGDDVEAKFTGVDRKNRAISLSVRAKDEADEKDAIATVNKQEDANFSNNAMAEAFKAAKGE

SEQ ID NO: 75237 - protein, 582 aa, Salmonella typhimurium
MHNDKDLSTWQTFRRLWPTIAPFKAGLIVAGIALILNAASDTFMLSLLKPLLDDGFGKTDRSVLLWMPLVVIGLMILRGITSYISSYCISWVSGKVVMTMRRRLFGHMMGMPVAFFDKQSTGTLLSRITYDSEQVASSSSGALITVVREGASIIGLFIMMFYYSWQLSIILVVLAPIVSIAIRVVSKRFRSISKNMQNTMGQVTTSAEQMLKGHKEVLIFGGQEVETKRFDKVSNKMRLQGMKMVSASSISDPIIQLIASLALAFVLYAASFPSVMDSLTAGTITVVFSSMIALMRPLKSLTNVNAQFQRGMAACQTLFAILDSEQEKDEGKRVIDRATGDLEFRNVTFTYPGREVPALRNINLKIPAGKTVALVGRSGSGKSTIASLITRFYDIDEGHILMDGHDLREYTLASLRNQVALVSQNVHLFNDTVANNIAYARTEEYSREQIEEAARMAYAMDFINKMDNGLDTIIGENGVLLSGGQRQRIAIARALLRDSPILILDEATSALDTESERAIQAALDELQKNRTSLVIAHRLSTIEQADEIVVVEDGIIVERGTHSELLAQHGVYAQLHKMQFGQ

SEQ ID NO: 75238 - protein, 159 aa, Salmonella typhimurium
MFVGLLLVSLIVAGRLANHYRNNAITYKEQRDTVTHRLTLANATITDMTKRQRDVAALDEKYTKELADAKAENDALRDDVAAGRRRLYVNATCPAVPTGKSTSTARMDNAASPRLADSAQRDYFALKERVKTMQKQLEGAQAYIRTQCHGNAGKTSNQW

SEQ ID NO: 75239 - protein, 120 aa, Salmonella typhimurium
MRQIPQNHIHTRSTPFWNKETAPAGIFERHLDKGTRPDVYPRLSVMQGAVKYLGYADEHCSEPEEIMVINAGEFGVFPPEKWHNIEVMTDDTYFNIDFFVAPEVLMEGATSRKVIHAGRE

SEQ ID NO: 75240 - protein, 60 aa, Salmonella typhimurium; identical to SEQ ID NO: 73467

SEQ ID NO: 75241 - protein, 82 aa, Salmonella typhimurium; identical to SEQ ID NO: 73468

SEQ ID NO: 75242 - protein, 812 aa, Salmonella typhimurium
MPVLISGVLKDGTGTPVQNCTIQLKACRTSTTVVVNTVASENPDDAGRYSMDVEQGQYTVTLLVDGYPPSHAGVITVYDDSKPGTLNDFLGAMTEDDVRPEALRRFEAMVEEVARQASEASRNATAAGQASEQAQTSAGQASESATAAVNAAGAAEASATQAASSAASAESSAGTATTKAGEASASAASADTARTAAAASAAAAKTSEANADASRTAAGDSAAAAAASATAAQTSAERAGASETAAKTSETQAASSAGDAGASATAAAASEKAAAASAAAAKTSETNAATSASTAAASATAASSSASEASTHAAASDTSASLAAQSSTAAGAAATRAEDAAKRAEDIADVISLEDASLTKKGIVKLSSATDSDSEALAATPKAVHAVMDEVQTKAPLDSPALTGTPTAPTPETAAAGIEIATAAFVAAKVAQLVGSAPETLDTLKELADALGNDPNFATTVLNKLAGKQPLDDTLTALSGKSVDGLIEYVGLRETINHAADALLKSQNGGDIPEKPLFVQNIGALPASGTAVAANRLASRGALPALTGATRGSDSGLIMGEVYNNGYPTQYGNILRLTGTGDGEILIGWSGTNGAPAPAYIRSHRDTADAEWSEWAMLYTSLNPPPNSYPVGAAIAWPSDATPAGYALMQGQSFDKSAYPLLAIAYPSGIIPDMRGWTIKGKPISGRAVLSQEMDGNKSHSHSARAQDTDLGTKSTSSFDYGTKSTNTTGNHTHQFGGYINSYWGDSNHTSFQPGGGAWTQAAGDHAHTVYIGGHEHTMYIGPHGHVVIVDADGNAETTVKNIAFNYIVRLA

SEQ ID NO: 75243 - protein, 649 aa, Salmonella typhimurium
MRLFIAEKPSLGRAIADVLPKPHRKGDGFIECGNGQVVTWCIGHLLEQAQPDAYDSRYARWNLADLPIVPEKWQLQPRPSVTKQLNVIKRFLHQAGEIIHAGDPDREGQLLVDEVLDYLQLPAEKRQQVRRCLINDLNPQAVERAIDRLRANSDFVPLCVSALARARADWLYGINMTRAYTILGRNAGYQGVLSVGRVQTPVLGLVVRRDEEIENFVAKDFFEVKAHIVTPADERFTAIWQPSEACEPYQDEEGRLLHRPLAEHVVNRINGQPALVTSYNDKRESESAPLPFSLSTLQIEAAKRFGLSAQNVLDICQKLYETHKLITYPRSDCRYLPEEHFAGRQAVMNAISVHAPDLLPQPVVNPDTRNRCWDDKKVDAHHAIIPTARSSSVHLTENEAKVYTLIARQYLMQFCPDAVFRKCVIELEIAKGKFVAKARFLAEAGWRTLLGSKERDEENDGTPLPVVAKGDELLCEKGEVVERQTQPPRHFTDATLLSAMTGIARFVQDKDLKKILRATDGLGTEATRAGIIELLFKRSFLTKKGRYIHSTDAGKALIHSLPEMAARPDMTAHWESVLTQISEKQCRYQDFMQPLVGTLYQLIEQAKRTPVKRFRGIVAPGGGDKKKSAPRKRAGKKSPPAAETGRQTE

SEQ ID NO: 75244 - protein, 492 aa, Salmonella typhimurium
MTLWINGDWITGQGERRRKTNPVSAEILWQGNDANAAQVAEACQAARAAFPRWARQPFAARQAIVEKFAALLEAHKAELTEVIARETGKPRWEAATEVTAMINKIAISIKAYHARTGAQKSELVDGAATLRHRPHGVLAVFGPYNFPGHLPNGHIVPALLAGNTLIFKPSELTPWTGETVIKLWERAGLPAGVLNLVQGGRETGQALSSLDDLDGLLFTGSASTGYQLHRQLSGQPEKILALEMGGNNPLIIEDAANIDAAVHLTLQSAFITAGQRCTCARRLLVKQGAQGDAFLARLVDVAGRLQPGRWDDDPQPFIGGLISAQAAQHVMEAWRQREALGGRTLLAPRKVKEGTSLLTPGIIELTGVADVPDEEVFGPLLNVWRYAHFDEAIRLANNTRFGLSCGLVSTDRAQFEQLLLEARAGIVNWNKPLTGAASTAPFGGVGASGNHRPSAWYAADYCAWPMASLESPELTLPATLSPGLDFSRREAV

SEQ ID NO: 75245 - protein, 870 aa, Salmonella typhimurium
MTQQPQAKYRHDYRAPDYQITDIDLTFDLDAEKTVVTAISQAVRHGAPDAPLRLDGEDLTLVSIHVNDAPWTAYKEEEGALVISDLPERFTLRIVNEISPAANTALEGLYQSGDALCTQCEAEGFRHITWYLDRPDVLARFTTKIIADKSKYPFLLSNGNRVAQGELENGRHWVQWQDPFPKPCYLFALVAGDFDVLRDTFTTRSGREVALELYVDRGNLDRAPWAMTSLKNSMKWDEARFGLEYDLDIYMIVAVDFFNMGAMENKGLNIFNSKYVLARTDTATDKDYLDIERVIGHEYFHNWTGNRVTCRDWFQLSLKEGLTVFRDQEFSSDLGSRAVNRISNVRTMRGLQFAEDASPMAHPIRPDKVIEMNNFYTLTVYEKGAEVIRMIHTLLGEENFQKGMQLYFERHDGSAATCDDFVQAMEDASNVDLSHFRRWYSQSGTPIVTVKDDYNPETEQYTLTISQRTPATADQAEKQPLHIPFAIELYDNEGNVIPLQKGGHPVNAVLNVTQAEQTFTFDNVYFQPVPALLCEFSAPVKLEYKWSDQQLTFLMRHARNDFSRWDAAQSLLATYIKLNVARHQQGQPLSLPVHVADAFRAVLLDEKIDPALAAEILTLPSANEIAELFEVIDPIAIAQVREALTRTLAAELADEFLAIYNANHLDEYRVDHGDIGKRTLRNACLRFLAFGETELANTLVSKQYRDANNMTDALAALSAAVAAQLPCRDTLMQEYDDKWHQDGLVMDKWFILQSTSPAENVLETVRGLLKHRSFSMSNPNRIRSLIGAFAGSNPAAFHAQDGSGYQFLVEMLTDLNSRNPQVASRLIEPLIRLKRYDDKRQEKMRAALEQLKGLENLSGDLYEKITKALA

SEQ ID NO: 75246 - protein, 322 aa, Salmonella typhimurium
MDNFLALTLSGTTPRVTQGKGAGFRWRWLGHGLLELTPDAPVDRALILSAGIHGNETAPVEMLDKLLSALYSGSLTLTWRVLVVLGNPQALAAGIRYCHSDMNRMFGGRWQSFAESDETRRARELELSLETFFSSGQARVRWHLDLHTAIRGSHHLRFGVLPQRDRPWETDFLAWLGAAGLEALVFHQAPGGTFTHFSSEHFGALSCTLELGKALPFRQNDLTQFNVTSQALSALLSGVETSTSFSPPLRYRVVSQITRHSDKFALYMDAQTLNFTAFAKGTLLAEEGDKRVTVTHDVEYVLFPNPSVACGLRAGLMLERLP

SEQ ID NO: 75247 - protein, 161 aa, Salmonella typhimurium
MRKLTALFVASTLAMGAANLAHAAETTTAAPADAKPMMQHKGKFGPHHDMMFKNLNLTDAQKQQIRDIMKAQREQMKRPLLEERRAMHDIIASDTFDKAKAEAQITKMEAQRKANMLAHMETQNKIYNVLTPEQKKQYNANFEKRLTERPAQEGKMPAAAE

SEQ ID NO: 75248 - protein, 452 aa, Salmonella typhimurium
MSNVIASLEKVLLPFAVKIGKQPHVNAIKNGFIRLMPLTLAGAMFVLINNVFLSFGEGSFFYSMGIRLDASTIETLNGLKGIGGNVYNGTLGIMSLMAPFFIGMALAEERKVDALAAGLLSVAAFMTVTPYSVGEAYAVGANWLGGANIISGIIIGLVVAEMFTFIVRRNWVIKLPDSVPASVSRSFSALIPGFIILSIMGIISWALSNYGSNFHQIIMDTISTPLASLGSVVGWAYVIFVPLLWFFGIHGSLALTALDSGIMTPWALENISIYQQYGSVDAALEAGKTFHIWAKPMLDSYIFLGGSGATLGLIIAIFLASRRADYRQVAKLALPSGIFQINEPILFGLPIIMNPVMFIPFILVQPILAAITLVAYYLGIIPPITNIAPWTMPTGLGAFFNTNGSVAALLVALFNLAVATLIYLPFVVVANKAQNAIEQEESEEDIANALKF

SEQ ID NO: 75249 - protein, 115 aa, Salmonella typhimurium; identical to SEQ ID NO: 73326

SEQ ID NO: 75250 - protein, 642 aa, Salmonella typhimurium
MPVITLPDGSQRHYDHPVSPMDVALDIGPGLAKATIAGRVNGELVDASDLIENDATLSIITAKDEEGLEIIRHSCAHLLGHAIKQLWPHTKMAIGPVVDNGFYYDVDLDRTLTQEDVEALEKRMHELAEKNYDVIKKKVSWHDARETFVKRGETYKVAILDENIAHDDKPGLYHHEEYVDMCRGPHVPNMRFCHHFKLMKTAGAYWRGDSNNKMLQRIYGTAWADKKALNAYLQRLEEAAKRDHRKIGKQLDLYHMQEEAPGMVFWHNDGWTIFRELEVFVRSKLKEYQYQEVKGPFMMDRVLWEKTGHWDNYKDAMFTTSSENREYCIKPMNCPGHVQIFNQGLKSYRDLPLRMAEFGSCHRNEPSGALHGLMRVRGFTQDDAHIFCTEEQIRDEVNACIRMVYDMYSTFGFEKIVVKLSTRPDKRIGSDEMWDRAEADLAVALEENNIPFEYQLGEGAFYGPKIEFTLYDCLDRAWQCGTVQLDFSLPSRLSASYVGEDNERKVPVMIHRAILGSMERFIGILTEEFAGFFPTWLAPVQVVVMNITDSQSEYVNELTQKLQNAGIRVKADLRNEKIGFKIREHTLRRVPYMLVCGDKEVEAGKVAVRTRRGKDLGSLDVNDVIEKLQQEIRSRSLQQLEE

SEQ ID NO: 75251 - protein, 144 aa, Salmonella typhimurium
VSLREALEKAEEAGVDLVEISPNAEPPVCRIMDYGKFLYEKSKSSKEQKKKQKVIQVKEIKFRPGTDEGDYQVKLRSLIRFLEEGDKAKITLRFRGREMAHQQIGMEVLNRVKDDLQELAVVESFPTKIEGRQMIMVLAPKKKQ

SEQ ID NO: 75252 - protein, 65 aa, Salmonella typhimurium [sequence omitted]

SEQ ID NO: 75253 - protein, 118 aa, Salmonella typhimurium [sequence omitted]

SEQ ID NO: 75254 - protein, 327 aa, Salmonella typhimurium
MSHLAELVANAAAAINQASDVAALDNVRVEYLGKKGHLTLQMTTLRDLPPEERPAAGAVINAAKEQVQQALNARKAELESAALNARLAAETIDISLPGRRIENGGLHPVTRTIDRIESFFGELGFTVATGPEIEDDYHNFDALNIPGHHPARADHDTFWFDATRLLRTQTSGVQIRTMKAQQPPIRIIAPGRVYRNDYDQTHTPMFHQMEGLIVDTNISFTNLKGTLHDFLRNFFEEDLQIRFRPSYFPFTEPSAEVDVMGKNGKWLEVLGCGMVHPNVLRNVGIDPEIYSGFAFGMGMERLTMLRYGVTDLRSFFENDLRFLKQFK

SEQ ID NO: 75255 - protein, 795 aa, Salmonella typhimurium
MKFSELWLREWVNPAIDSDALANQITMAGLEVDGVEPVAGSFNGVVVGEVVECAQHPNADKLRVTKVNVGGERLLDIVCGAPNCRQGLKVAVATIGAILPGDFKIKAAKLRGEPSEGMLCSFSELGISDDHSGIIELPADAPLGTDIREYLKLDDNTIEISVTPNRADCLGIIGVARDVAVLNKAPLQEPEMAPVTATISDTLPITVEAADACPRYLGRVVKGINVNAPTPLWMKEKLRRCGIRSIDAVVDVTNYVLLELGQPMHAFDKDRIDGGIVVRMAKEGETVVLLDGSEATLNADTLVIADHHKALGIAGIFGGEHSGVNGETQNVLLECAYFNPLSITGRARRHGLHTDASHRYERGVDPALQYKAIERATRLLLDICGGDAGPIIDVSNEATLPKRATITLRRSKLDRLIGHHIADEQVSDILRRLGCEVTEGQDEWKAVAPTWRFDMEIEEDLVEEVARVYGYNNIPDEPIQAGLIMGTHREADLSLKRVKTMLNDKGYQEVITYSFVDPKVQQLIHPGAEALLLPNPISVEMSAMRLSLWSGLLATVVYNQNRQQNRVRIFETGLRFVPDTQANLGIRQDLMLAGVICGNRYDEHWNLAKETVDFYDLKGDLEAVLDLTGKLGDIQFKAEMNPALHPGQSAAIYLKDERIGFIGVVHPELERKLDLNGRTLVFELEWNKLADRIVPQAREISRFPANRRDIAVVVAENVPAADILSECKKVGVNQVVGVNLFDVYRGKGVAEGYKSLAISLILQDTNRTLEEEEIAATVAKCVEALKERFQASLRD

SEQ ID NO: 75256 - protein, 326 aa, Salmonella typhimurium
MLTFARQQQRRNVRWLLSLSLLVLLATLLSLCAGEQWIAPGDWLSARGELFVWQIRLPRTLAVLLVGAALALSGAVMQALFENPLAEPGLLGVSNGAGVGLIAAVLLGQGQLPGWALGLCAIAGALIITLILLRFARRHLSTSRLLLAGVALGIICSALMTWAIYFSTSFDLRQLMYWMMGGFGGVDWQQSWLMIALIPVLIWICCQSQPLNMLALGETSARQLGLPLWFWRNLLVVATGWMVGVSVAMAGAIGFIGLVIPHILRLCGLTDHRVLLPGCALAGAIALLLADVVARLALASAELPIGVVTATLGAPVFIWLLLKSAR

SEQ ID NO: 75257 - protein, 110 aa, Salmonella typhimurium
MQIGKLAALTGVSIRMLRYYESAGLLHPSRTDTGYRSFSSEDVDIVRRILILNGAGFTLPVVCSLLNCVHAGTSPCEELKAKVREQLAQIDRQFDALSESRNLLNKFLND

SEQ ID NO: 75258 - protein, 237 aa, Salmonella typhimurium
MIASLDELYHSELFFLPVMDENARLVGLEIIATFAAEDGAVRMPTELVAPRLSVEEQYCLFVEKLALLETCQHFFIQHKLIAWLNLPPAISDLLLLDSELFSRAARFPFLELAINENYPGLNQGKNNETLANLAMHFPLMLANFGAGEASTKAIFDGLFKRVMLDKNFIQQRAEMISFEPFMHAIVAQISSSCESLMIAGIDTEAMFARAAPLGFSAFQGGLWPPVPVSQLIKLVQR

SEQ ID NO: 75259 - protein, 548 aa, Salmonella typhimurium
MAAKDVKFGNDARVKMLRGVNVLADAVKVTLGPKGRNVVLDKSFGAPTITKDGVSVAREIELEDKFENMGAQMVKEVASKANDAAGDGTTTATVLAQSIITEGLKAVAAGMNPMDLKRGIDKAVAAAVEELKALSVPCSDSKAIAQVGTISANSDETVGKLIAEAMDKVGKEGVITVEDGTGLQDELDVVEGMQFDRGYLSPYFINKPETGAVELESPFILLADKKISNIREMLPVLEAVAKAGKPLLIIAEDVEGEALATLVVNTMRGIVKVAAVKAPGFGDRRKAMLQDIATLTGGTVISEEIGMELEKATLEDLGQAKRVVINKDTTTIIDGVGEEAAIQGRVAQIRQQIEEATSDYDREKLQERVAKLAGGVAVIKVGAATEVEMKEKKARVEDALHATRAAVEEGVVAGGGVALIRVASKIADLKGQNEDQNVGIKVALRAMEAPLRQIVLNCGEEPSVVANTVKGGDGNYGYNAATEEYGNMIDMGILDPTKVTRSALQYAASVAGLMITTECMVTDLPKSDAPDLGAAGGMGGMGGMGGMM

SEQ ID NO: 75260 - protein, 123 aa, Salmonella typhimurium
LIMGNNMHVKYLAGIVGAALLMAGCSSSNELTAAGQNVRFVEDKPGAECQLIGTATGKQSNWFSGQHGEEGGSMRGAANDLRNQAAAMGGNVLYGVSSPSQGMLSSFVPTASEMNGQVYKCPN

SEQ ID NO: 75261 - protein, 398 aa, Salmonella typhimurium
LLEIMLAKSDIVLRDLKYAIIANKYNNGGDKCQCKGKIQNDILQANSREITGNQWDKKVSYAPHHHIYTGDFSFTLREKFRHYRYALNTSSSGKTNHEGASITDQWRGIQVNCRSGDCRQPGIENIGPDGANHFFQQCGKNKHANQRSHTVIRDGFQRVGFRHSGEGHRIFRHPDHNHIEGERGDAKNGSYAFQPDEGSTVHLGFFRNTGIDKLAGKTAFQQHQRDEDEKDTGDYHRVAVPDMVDQGADDKGINHLPKRDHRFNQNNCRARCFGKTLHCRVSAGIQRGVRHADTHRYESDHQVRTGGNTEEKQHIYGAKQYYCPTAKFIGQYAKENTDQTTKTNARDIGNTGTIRGEFLCKGGHVLGCNNTHAVEKVTKINADNSQQIWHVASLVLRH

SEQ ID NO: 75262 - protein, 325 aa, Salmonella typhimurium
MSETATWQPSASIPNLLKRAAIMAEIRRFFADRGVLEVETPCMSQATVTDIHLFPFETRFVGPGHSQGINLYLMTSPEYHMKRLLAAGCGPVFQLCRSFRNEEMGRHHNPEFTMLEWYRPHYDMYRLMNEVDDLLQQVLDCQPAESLSYQQAFQRHLEIDPLSADKTQLREAAAKLDLSNIADTEEDRDTLLQLLFTMGVEPHIGKEKPTFIYHFPASQASLAQISTEDHRVAERFEVYYKGIELANGFHELTDAREQQQRFEQDNRKRAARGLPQQPIDQNLLDALAAGLPDCSGVALGVDRLVMLALGAESLADVIAFTVDRA

SEQ ID NO: 75263 - protein, 500 aa, Salmonella typhimurium
MTHTIKKMSLIGLILMIFTSVFGFANSPSAFYLMGYSAIPWYIFSALLFFIPFALMMAEMGSAYRKEEGGIYSWMNNSVGPRYAFIGTFMWFSSYVIWMVSTAAKIWVPFSTFVFGADMTQHWRIAGLEPTQVVGLLAVGWMILVTCVAARGINKIARITAVGGIAVMCLNLVLLLVSVAILLLNGGHFAQEINFTSSPNPGYHSGLAMLSFVVFAIFAYGGIEAVGGLVDKTEKPEKNFAKGIVFAAIVISIGYSLAIFLWGVSTNWQQILSNSAVNLGNITYILMSSLGTTLGNALNLSPEAAMTVGVWFARITGLSMFLAYTGAFFTLSYSPLKAIIQGTPKALWPAPMTTLNANGMPATAMWLQCVLVSLFILLVSFGGDTASAFYNKLTLMANVSMTLPYLFLALAFPFFKARQDLERPFVLFKTKASTLVATGVVVLVVTFANVFTIIQPVIEAGDWDSALWMIGGPIFFSLLAMAIYQNYSSRMSADPEWAAE

SEQ ID NO: 75264 - protein, 248 aa, Salmonella typhimurium; identical to SEQ ID NO: 73453

SEQ ID NO: 75265 - protein, 618 aa, Salmonella typhimurium
MPIQVLPPQLANQIAAGEVVERPASVVKELVENSLDAGATRVDIDIERGGAKLIRIRDNGCGIKKEELALALARHATSKIASLDDLEAIISLGFRGEALASISSVSRLTLTSRTAEQAEAWQAYAEGRDMDVTVKPAAHPVGTTLEVLDLFYNTPARRKFMRTEKTEFNHIDEIIRRIALARFDVTLNLSHNGKLVRQYRAVAKDGQKERRLGAICGTPFLEQALAIEWQHGDLTLRGWVADPNHTTTALTEIQYCYVNGRMMRDRLINHAIRQACEDKLGADQQPAFVLYLEIDPHQVDVNVHPAKHEVRFHQSRLVHDFIYQGVLSVLQQQTETALPLEEIAPAPRHVQENRIAAGRNHFAVPAEPTAAREPATPRYSGGASGGNGGRQSAGGWPHAQPGYQKQQGEVYRTLLQTPTASPAPESVTPALDGHSQSFGRVLTIVGGDCALLEHAGTIQLLSLPVAERWLRQAQLTPGQSPVCAQPLLIPLRLKVSADEKAALQKAQSLLGELGIEFQSDAQHVTIRAVPLPLRQQNLQILIPELIGYLAQQTTFATVNIAQWIARNVQSEHPQWSMAQAISLLADVERLCPQLVKAPPGGLLQPVDLHSAMNALKHE

SEQ ID NO: 75266 - protein, 221 aa, Salmonella typhimurium
MTPFTQSQRIKALFWLSLFHLLVIISSNYLVQLPITIFGFHTTWGAFSFPFIFLATDLTVRIFGAPLARRIIFAVMIPALLVSYVVSSLFYMGAWQGFAALANFNLFVARIAAASFMAYALGQILDVHVFNRLRQNRRWWLAPTASTLFGNISDTLAFFFIAFWRSPDAFMAGHWMEIALVDYCFKVLISIIFFLPMYGVLLNMLLKKLADKSEISPLPAS

SEQ ID NO: 75267 - protein, 419 aa, Salmonella typhimurium
MAWNQPGNNGQDRDPWGSSKPGSNSGGNGNKGGRDQGPPDLDDIFRKLSKKLGGFGGGKGTGSGGGSSSQGPRPQLGGRIVAIAAAAVVIIWAASGFYTIKEAERGVVTRFGKFSHLVEPGLNWKPTFIDDVTPVNVEAVRELAASGVMLTSDENVVRVEMNVQYRVTDPQKYLFSVTSPDDSLRQATDSALRGVIGKYTMDRILTEGRTVIRSDTQRELEETIKPYNMGITLLDVNFQAARPPEEVKAAFDDAIAARENEQQYIREAEAYTNEVQPRANGQAQRILEEARAYKTQTILEAQGEVARFAKILPEYKAAPQITRERLYIETMEKVLSHTRKVLVNDKSGNLMVLPLDQMLKGGNAPAAKSDNSASNLLRLPPSTKSNASGASNTSSSNQGDIMDQRRANAQRNDYQRQGE

SEQ ID NO: 75268 - protein, 432 aa, Salmonella typhimurium
MGNNVVVLGTQWGDEGKGKIVDLLTERAKYVVRYQGGHNAGHTLVINGEKTVLHLIPSGILRENVTSIIGNGVVLSPSALMKEMKELEDRGIPVRERLLLSEACPLILDYHVALDNAREKARGAKAIGTTGRGIGPAYEDKVARRGLRVGDLFDKETFAEKLKEVMEYHNFQLVNYYKAEAVDYQKVLDDTMAVADILTSMVVDVSDLLDQARQRGDFVMFEGAQGTLLDIDHGTYPYVTSSNTTAGGVATGSGLGPRYVDYVLGILKAYSTRVGAGPFPTELFDETGEFLCKQGNEYGATTGRRRRTGWLDTVAVRRAVQLNSLSGFCLTKLDVLDGLKEVKLCVAYRMPDGREVTTTPLAADDWKGVEPIYETMPGWSESTFGVKDRSGLPQAALNYIKRIEELTGVPIDIISTGPDRTETMILRDPFDA

SEQ ID NO: 75269 - protein, 141 aa, Salmonella typhimurium
VQLTSFTDYGLRALIYMASLPDGRMTSISEVTEVYGVSRNHMVKIINQLSRAGFVTAVRGKNGGIRLGKPANTICIGDVVRELEPLSLVNCSSEFCHITPACRLKQALSKAVQSFLKELDNYTLADLVEENQPLYKLLLVE

SEQ ID NO: 75270 - protein, 498 aa, Salmonella typhimurium
MLHLFAGLDLHTGLLLLLALAFVLFYEAINGFHDTANAVATVIYTRAMRSQLAVVMAAVFNFFGVLLGGLSVAYAIVHMLPTDLLLNMGSAHGLAMVFSMLLAAIIWNLGTWYFGLPASSSHTLIGAIIGIGLTNAMMTGTSVVDALNIPKVINIFGSLIISPIVGLVFAGGLIFLLRRYWSGTKKRARIHLTPAEREKKDGKKKPPFWTRIALILSAIGVAFSHGANDGQKGIGLVMLVLIGVAPAGFVVNMNASSYEITRTRDAINNVETYFEQRPDLLKAVTGVDQLIPSPEPGATEPTEFHCHPANTINALNRAKGMLANVESYDKLSVEQRSQLRRIMLCISDTTDKVVKLPGVSSDDQRLLKKLKTDMLSTIEYAPVWIIMAVALALGIGTMIGWRRVATTIGEKIGKKGMTYAQGMSAQMTAAVSIGLASYTGMPVSTTHVLSSSVAGTMVVDGGGLQRKTVTSILMAWVFTLPAAIILSGVLYWLSLKII

SEQ ID NO: 75271 - protein, 433 aa, Salmonella typhimurium
MSGTYNATIRRVVVSAWIGNSIEYYDFLLYGLASALVFGPLFFPGASPLTATLSSFASFGVGFISRPLGALFFGNRGDTLGRKNTLLITLGGMGAVTFLIGCLPSYASIGALAPALLVILRFLQGFMVGGEWGGAMLMVVEYAAGKHRGRLSALSQTGGLTGQLLATGVFIVVTQLPQEALLSWGWRIPFLLSALLVLPGLYMRHRLDETPVFRAFKKQQAINHRQQREERPVVKVVREQWRSILLIIILRFAESVPFFLATVFAVSWATTQLGIASLTILYIVMFTCLLAYPMHVLFGIMSDRRGCRQVYIFGALFVAAMAFPFFWLLESRSLILMTMGYVLLINIGHNSLNAVQPSFFAGLFHPPVRYSGSSIGAQLGAVVAGGFTPFIAKALSAVYDNSWALVAGYVVLTALASAFAAKIAPETVLPHSP

SEQ ID NO: 75272 - protein, 241 aa, Salmonella typhimurium
MATVSMRDMLKAGVHFGHQTRYWNPKMKPFIFGARNKVHIINLEKTVPMFNEALAELNKISARKGKILFVGTKRAASEAVKEAANSCDQFFVNHRWLGGMLTNWKTVRQSIKRLKDLETQSQDGTFEKLTKKEALMRTRELEKLENSLGGIKDMGGLPDALFVIDADHEHIAIKEANNLGIPVFAIVDTNSDPDGVDFVIPGNDDAIRAVSLYLGAVAATVREGRSQDLASQAEESFVEAE

SEQ ID NO: 75273 - protein, 283 aa, Salmonella typhimurium
MAEITASLVKELRERTGAGMMDCKKALTEANGDIELAIENMRKSGAIKAAKKAGNVAADGVIKTKIDGNVAFILEVNCQTDFVAKDAGFQAFADKVLDAAVAGKITDVEVLKAQFEEERVALVAKIGENINIRRVASLEGDVLGSYQHGARIGVLVAAKGADEELVKQLAMHVAASKPEFVKPEDVSADVVEKEYQVQLDIAMQSGKPKEIAEKMVEGRMKKFTGEVSLTGQPFVMEPSKSVGQLLKEHNADVTGFIRFEVGEGIEKVETDFAAEVAAMSKQS

SEQ ID NO: 75274 - protein, 241 aa, Salmonella typhimurium
MATNAKPVYKRILLKLSGEALQGTEGFGIDASILDRMAQEIKELVELGIQVGVVIGGGNLFRGAGLAKAGMNRVVGDHMGMLATVMNGLAMRDALHRAYVNARLMSAIPLNGVCDNYSWAEAISLLRNNRVVILSAGTGNPFFTTDSAACLRGIEIEADVVLKATKVDGVFTADPAKDPSATMYDQLTYSEVLDKELKVMDLAAFTLARDHKLPIRVFNMNKPGALRRVVMGEKEGTLITE

SEQ ID NO: 75275 - protein, 280 aa, Salmonella typhimurium
MLSYRHSFHAGNHADVLKHTVQSLIIESLKEKEKPFLYLDTHAGAGRYQLGSEHAERTGEYLEGIARIWQQDDLPAELEPYISVVKHFNRSGQLRYYPGSPLIARQLLREQDSLQLTELHPSDFPLLRAEFQKDNRARVERADGYQQLKAKLPPVSRRGLILIDPPYEMKTDYQAVVSGISEGYKRFATGTYALWYPVVLRQQIKRMIHELEATGIRKILQIELAIRPDSDQRGMTASGMIVVNPPWKLEQQMNNVLPWLHSRLAPNGHGHTSVSWIVPE

SEQ ID NO: 75276 - protein, 450 aa, Salmonella typhimurium
MTKHYDYIAIGGGSGGIASINRAAMYGQKCALIEAKELGGTCVNVGCVPKKVMWHAAQIREAIHLYGPDYGFDTTINQFDWSKLIASRTAYIDRIHTSYDNVLGKNNVDVIKGFARFVDAKTIEVNGETITADHILIATGGRPSHPEIPGVEYGIDSDGFFALSALPERVAVVGAGYIAVELAGVINALGAKTHLFVRKHAPLRSFDPMISETLVEVMNAEGPQLHTHAVPKAVVKNADGSLTLELEDGRSETVDCLIWAIGREPSTDNINLAAAGVKTNEKGYIIVDKFQNTNVEGIYAVGDNTGAVELTPVAVAAGRRLSERLFNNKPEEHLDYSNIPTVVFSHPPIGTVGLSEPQAREQYGDEQVKVYKSSFTAMYTAVTTHRQPCRMKLVCVGPEEKIVGIHGIGFGMDEMLQGFAVALKMGATKKDFDNTVAIHPTASEEFVTMR

SEQ ID NO: 75277 - protein, 476 aa, Salmonella typhimurium
VTQQPRLPEIVMEILYNIFTIFFNQVMTNAPLLLGIVTCLGYILLRKSVSVIIKGTIKTIIGFMLLQAGSGILTSTFKPVVAKMSEVYGINGAISDTYASMMATIERMGDAYSWVGYAVLLALALNICYVLLRRITGIRTIMLTGHIMFQQAGLIAVSFYIFGYSMWTTIICTAILVSLYWGITSNMMYKPTQEVTDGCGFSIGHQQQFASWIAYKVAPFLGKKEESVEDLKLPGWLNIFHDNIVSTAIVMTIFFGAILLSFGIDTVQAMAGKTHWTIYILQTGFSFAVAIFIITQGVRMFVAELSEAFNGISQRLIPGAVLAIDCAAIYSFAPNAVVWGFMWGTIGQLIAVGILVACGSSILIIPGFIPMFFSNATIGVFANHFGGWRAALKICLVMGMIEIFGCVWAVKLTGMSAWMGMADWSILAPPMMQGFFSLGIAFMAVIIVIALAYMFFAGRALRAEEDAEKQLAEQSA

SEQ ID NO: 75278 - protein, 185 aa, Salmonella typhimurium
VISDIRKDAEVRMEKCVEAFKTQISKVRTGRASPSLLDGIVVEYYGTPTPLRQLASVTVEDSRTLKINVFDRSMGPAVEKAIMASDLGLNPSSAGTDIRVPLPPLTEERRKDLTKIVRGEAEQARVAVRNVRRDANDKVKALLKDKAISEDDDRRSQEEVQKMTDAAIKKVDAALADKEAELMQF

SEQ ID NO: 75279 - protein, 252 aa, Salmonella typhimurium
MLSATQPVSENLPAHGCRHVAIIMDGNGRWAKKQGKIRAFGHKAGAKSVRRAVSFAANNGIDALTLYAFSSENWNRPAQEVSALMELFVWALDSEVKSLHRHNVRLRIIGDISRFNSRLQERIRKSEALTAHNTGLTLNIAANYGGRWDIVQGVRQLAEQVQAGVLRPDQIDEERLGQQICMHELAPVDLVIRTGGEHRISNFLLWQIAYAELYFTDVLWPDFDEQDFEGALHAFANRERRFGGTEPGDDKA

SEQ ID NO: 75280 - protein, 285 aa, Salmonella typhimurium
LLKYRLISAFVLIPAVIAALFLLPPVGFAIITLVVCMLAAWEWGQLSGFAARSQRVWLAVLCGLLLALMLFLLPEYHHNIRQPLVEMSLWASLGWWVVALLLVLFYPGSAAIWRNSKTLRLIFGLLTIVPFFWGMLALRAWHYDENHYSGAIWLLYVMILVWGADSGAYMFGKLFGKHKLAPKVSPGKTWQGFIGGLATAAVISWGYGMWANLNVAPVILLICSVVAALASVLGDLTESMFKREAGIKDSGHLIPGHGGILDRIDSLTAAVPVFACLLLLVFRTL

SEQ ID NO: 75281 - protein, 341 aa, Salmonella typhimurium
MPSIRLADLAEQLDAELHGDGDIVITGVASMQSATTGHITFMVNPKYREHLGLCQASAVVMTQDDLPFAKSAALVVKNPYLTYARMAQILDTTPQPAQNIAPSAVIDATATLGSNVSVGANAVIESGVQLGDNVVIGAGCFVGKNSKIGAGSRLWANVTIYHDIQIGENCLIQSSTVIGADGFGYANDRGNWVKIPQLGRVIIGDRVEIGACTTIDRGALDDTVIGNGVIIDNQCQIAHNVVIGDNTAVAGGVIMAGSLKIGRYCMIGGASVINGHMEICDKVTVTGMGMVMRPITEPGVYSSGIPLQPNKVWRKTAALVMNIDDMSKRLKAIERKVNQQD

SEQ ID NO: 75282 - protein, 151 aa, Salmonella typhimurium
LTTNTHTLQIEEILELLPHRFPFLLVDRVLDFEEGRFLRAVKNVSVNEPFFQGHFPGKPILPGVLILEAMAQATGILAFKSVGKLEPGELYYFAGIDEARFKRPVVPGDQMIMEVTFEKTRRGLTRFKGVALVDGKVVCEATMMCARSREA

SEQ ID NO: 75283 - protein, 119 aa, Salmonella typhimurium
MVSTLITVAVIAWCAQLALGGWQISRFNRAFDKLSQQGRVGVGRSGGRFKPRVVVAVALDEQQRVTDTLLMKGLTVFARPVKIAAMQGKHLHELQPDVIFPHDSLAQNALSLALKLKHG

SEQ ID NO: 75284 - protein, 154 aa, Salmonella typhimurium
MKLRDSLAENNSIRLQAEANTWQEAVKIGVDLLVAADVVEPRYYQAILDGVEQFGPYFVIAPGLAMPHGRPEEGVKKTGFSLVTLKKPLEFNHEDNDPVDILITMAAVDANTHQEVGIMQIVNLFEDEANFDRLRACRTAQEVLDLIDRTNAAA

SEQ ID NO: 75285 - protein, 228 aa, Salmonella typhimurium
MQKLKQQVFDANMDLPRYGLVTFTWGNVSAIDRERGLVVIKPSGVAYETMKVDDMVVVDMDGKVVEGRYRPSSDTATHLALYQRYPSLGGVVHTHSTHATAWAQAGMAIPALGTTHADYFFGDIPCTRALSEEEVQGEYELNTGKVIIETLGEVEPLHTPGIVVYQHGPFAWGKDAHDAVHNAVVMEEVARMAWIARGINPALNPIDDYLMNKHFMRKHGPNAYYGQK

SEQ ID NO: 75286 - protein, 131 aa, Salmonella typhimurium
MRHYEIVFMVHPDQSEQVPGMIERYSAAITGAEGKIHRLEDWGRRQLAYPINKLHKAHYVLMNVEAPQEVIDELETTFRFNDAVIRSMVMRTKHAVTEASPMVKAKDERRERRDDFANETADDAEAGDSEE

SEQ ID NO: 75287 - protein, 104 aa, Salmonella typhimurium; identical to SEQ ID NO: 73120

SEQ ID NO: 75288 - protein, 75 aa, Salmonella typhimurium; identical to SEQ ID NO: 73119

SEQ ID NO: 75289 - protein, 149 aa, Salmonella typhimurium
MQVILLDKVANLGSLGDQVNVKAGYARNFLVPKGKAVPATKKNVEYFEARRAELEAKLADVLAAANARAEKINALETVTIASKAGDEGKLFGSIGTRDIADAVTAAGVDVAKSEVRLPNGVLRTTGEHEVNFQVHSEVFAKVIINVVAE

SEQ ID NO: 75290 - protein, 382 aa, Salmonella typhimurium
MAAQRPLTIALVAGETSGDILGAGLIRALKARVPNARFVGVAGPRMQAEGCEAWYEMEELAVMGIVEVLGRLRRLLHIRADLTRRFTELKPDVFVGIDAPDFNITLEGNLKKKGIKTIHYVSPSVWAWRQKRVFKIGRSTHMVLAFLPFEKAFYDKFNVPCRFIGHTMADAMPLDPDKNAARDVLGIPHDAHCLALLPGSRGAEVEMLSADFLKTAQLLRQRYPDLEVVVPLVNAKRREQFEKIKAEVAPDLAVHLLDGMAREAMIASDAALLASGTAALECMLAKCPMVVGYRMKPFTFWLAKRLVKTEYVSLPNLLAGRELVKELLQEECEPQKLAEALLPLLANGKTSHAMHDTFRELHQQIRCNADEQAADAVLELAQ

SEQ ID NO: 75291 - protein, 198 aa, Salmonella typhimurium
MIEFVYPHTHLVAGVDEVGRGPLVGAVVTAAVILDPARPIVGLNDSKKLSEKRRLSLYDEIKEKALSWSLGRAEAHEIDELNILHATMLAMQRAVAGLHIAPEYVLIDGNRCPELPVPSMAVVKGDSRVAEISAASILAKVTRDAEMAALDIVFPQYGFAQHKGYPTAFHLEKLAQYGATAHHRRSFAPVKRALGLVS

SEQ ID NO: 75292 - protein, 1160 aa, Salmonella typhimurium
MSEPRFVHLRVHSDYSMIDGLAKTGPLVKKAASLGMPALAITDFTNLCGLVKFYGAGHGAGIKPIVGADFNVHNELLGDELTHLTVLAANNTGYQNLTLLISKAYQRGYGAAGPIIERDWLVELKEGLILLSGGRMGDVGRCLLRGNQALVEECVAFYEAHFPDRYFLELIRTGRQDEETYLHAAVELAEARGLPVVATNDVRFLESDDFDAHEIRVAIHDGFTLDDPKRPRNYSPQQYMRSEEEMCELFSDIPEALENTVEIAKRCNVTVRLGEYFLPQFPTGDMTTEDYLVKKAKEGLEERLAFLFPDEEERKKRRPEYDERLDIELQVINQMGFPGYFLIVMEFIQWSKDNGVPVGPGRGSGAGSLVAYALKITDLDPLEFDLLFERFLNPERVSMPDFDVDFCMEKRDQVIEHVADMYGRDAVSQIITFGTMAAKAVIRDVGRVLGHPYGFVDRISKLVPPDPGMTLAKAFEAEPQLPEIYEADEEVRALIDMARKLEGVTRNAGKHAGGVVIAPTKITDFAPLYCDEEGKHPVTQFDKSDVEYAGLVKFDFLGLRTLTIINWALEMINKRRAKNGEPPLDIAAIPLDDKKSFDMLQRSETTAVFQLESRGMKDLIKRLQPDCFEDMIALVALFRPGPLQSGMVDNFIDRKHGREELSYPDVQWQHESLKPVLEPTYGIILYQEQVMQIAQVLSGYTLGGADMLRRAMGKKKPEEMAKQRSVFEEGAKKNGIDGELAMKIFDLVEKFAGYGFNKSHSAAYALVSYQTLWLKAHYPAEFMAAVMTADMDNTEKVVGLVDECWRMGLKILPPDINSGLYHFHVNDEGEIVYGIGAIKGVGEGPIEAIIDARNQGGYFRELFDLCARTDTKKLNRRVLEKLIMSGAFDRLGPHRAALMNSLGDALKAADQHAKAEAIGQTDMFGVLAEEPEQIEQSYASCQPWPEQVVLDGERETLGLYLTGHPINQYLKEIERYVGGVRLKDMHPTERGKVTTAAGLVIAARVMVTKRGNRIGICTLDDRSGRLEVMLFTDALDKYQQLLEKDRILIVSGQVSFDDFSGGLKMTAREVMDIDEAREKYARGLAISLTDRQIDDQLLNRLRQSLEPHRSGTIPVHLYYQRADARARLRFGATWRVSPSDRLLNDLRGLIGSEQVELEFD

SEQ ID NO: 75293 - protein, 319 aa, Salmonella typhimurium
MSLNFLDFEQPIAELEAKIDSLTAVSRQDEKLDINIDEEVHRLREKSVELTRKIFADLGAWQVAQLARHPQRPYTLDYVRLAFDEFDELAGDRAYADDKAIVGGIARLEGRPVMIIGHQKGRETKEKIRRNFGMPAPEGYRKALRLMEMAERFNMPIITFIDTPGAYPGVGAEERGQSEAIARNLREMSRLNVPVICTVIGEGGSGGALAIGVGDKVNMLQYSTYSVISPEGCASILWKSADKAPLAAEAMGIIAPRLKELKLIDSIIPEPLGGAHRNPEAMAASLKAQLLEDLADLDVLSTDDLKNRRYQRLMSYGYA

SEQ ID NO: 75294 - protein, 129 aa, Salmonella typhimurium; identical to SEQ ID NO: 72804

SEQ ID NO: 75295 - protein, 430 aa, Salmonella typhimurium
MTTLTLNTSLLSSRRILAAFSGGLDSTVLLHQLVLWRERHPDVTLRAIHIHHGLSPHADSWVRHCETVCERWQVPLVVERVTLADNGLGIEAHAREARYRAFAQTLLPGEVLATAQHLDDQCETFLLALKRGSGPAGLSAMGERSPFAGTLLLRPLLRETRKTLEQWAVRHGLCWIEDESNQDDAYDRNFLRLRALPLLQQRWPHFPAAVARSATLCAEQERLLDELLASDLTDCITAEGTLRLSPLMSMSDVRRAAILRRWLAMRNAPMPSRDALERIWQEVALARDDASPCLRFGDHEIRRYQSQLWWIKSVAGQHETTVAWPVWQTPLALPAGLGTVQLVPGGELRRPREEESVSIRFKAPGVLHIVGRNGGRKLKKIWQEQGIPPWRRDTTPLLFYGETLIAAAGVFVTREGAAEDKEGVSLVWHA

SEQ ID NO: 75296 - protein, 290 aa, Salmonella typhimurium
MCTTCGCAEGNLYIEGDEHNPHSAFRSAPFAPAARPALNITGIKTPDFAPSQTAEGDLHYGHGEAGTHAPGMSQRRMLEVEIDVLDKNNRLAERNRARFAARQQLVLNLVSSPGSGKTTLLTETLMKLKDRVPCAVIEGDQQTVNDAARIRATGTPAIQVNTGKGCHLDAQMIADAAPRLPLDDHGILFIENVGNLVCPASFDLGEKHKVAVLSVTEGEDKPLKYPHMFAAASLMLLNKVDLLPYLNFDVEKCIASAREVNPEIEIILISATSGEGMDQWLAWLEAQRCA

SEQ ID NO: 75297 - protein, 372 aa, Salmonella typhimurium
MRFVDEYRAPEQVMQLIEHLRERAALLPYTAERPLRIMEVCGGHTHAIFKFGLDQLLPENVEFIHGPGCPVCVLPMGRIDSCVEIASHPEVIFCTFGDAMRVPGKQGSLLQAKARADVRIVYSPMDALKLAQDNPTRKVVFFGLGFETTMPTTAITLQQAKQRDVRNFYFFCQHITLIPTLRSLLEQPDNGIDAFLAPGHVSMVIGTEAYQFIAADFHRPLVVAGFEPLDLLQGVVMLVEQKIAALSQVENQYRRVVPDAGNMLAQQAIADVFCVNGDSEWRGLGVIESSGVHLTPEYQRFDAEAHFRPAPQQVYDDPRARCGEVLTGRCKPHQCPLFGKTCNPETAFGALMVSSEGACAAWYQYRQQECEV

SEQ ID NO: 75298 - protein, 692 aa, Salmonella typhimurium
MSYTPMSDLGQQGLFDITRTLLQQPDLASLSEALSQLVKRSALADSAGIVLWQAQSQRAQYYATRENGRPVEYEDETVLAHGPVRRILSRPDALHCNFHEFTETWPQLAASGLYPEFGHYCLLPLAAEGRIFGGCEFIRQEDRPWSEKEYDRLHTFTQIVGVVAEQIQNRVNNNVDYDLLCRERDNFRILVAITNAVLSRLDIDELVSEVAKEIHHYFNIDAISIVLRSHRKNKLNIYSTHYLDEHHPAHEQSEVDEAGTLTERVFKSKEMLLINLNERDPLAPYERMLFDTWGNQIQTLCLLPLMSGKTMLGVLKLAQCEEKVFTTANLKLLRQIAERVAIAVDNALAYQEIHRLKERLVDENLALTEQLNNVDSEFGEIIGRSEAMYNVLKQVEMVAQSDSTVLILGETGTGKELIARAIHNLSGRSGRRMVKMNCAAMPAGLLESDLFGHERGAFTGASAQRIGRFELADKSSLFLDEVGDMPLELQPKLLRVLQEQEFERLGSNKLIQTDVRLIAATNRDLKKMVADREFRNDLYYRLNVFPIQLPPLRERPEDIPLLVKAFTFKIARRMGRNIDSIPAETLRTLSSMEWPGNVRELENVVERAVLLTRGNVLQLSLPDITAVTPDTSPVATESDKEGEDEYQLIIRVLKETNGVVAGPKGAAQRLGLKRTTLLSRMKRLGIDKDALA

SEQ ID NO: 75299 - protein, 432 aa, Salmonella typhimurium
MQDDTLPLNNSNATTTPLSTRLPFTKYDFGWVLLCIGMAIGAGTVLMPVQIGLKGIWVFITAFIIAYPATYIVQDIYLKTLSESETCDDYTDIISHYLGKNWGIFLGVIYFLMIIHGVFIYSLSVVFDSASYIKTFGLTEADLSQSIIYKVAIFAVLVAIASGGEKLLFKISGPMVVVKVGIILIFGFAMIPHWNLDNISAFPAASVFFRDVLLTIPFCFFSAVFIQVLNPMNIAYRKREPDRVLATRMAIRTHRISYITLIAIILFFSFSFTFSISHEEAVSAFEQNISALALAAQVIPGHIIHITSTILNIFAVLTAFFGIYLGFHEALKGIVLNVLSRIMDVKNVNPLLLTSGICVFIVVTLVIWVSFRVSVLVFFQLGSPLYGIVACIIPFFLIYKVAQLEKLRGLKTWLILLYGILLCLSPLLKLIE

SEQ ID NO: 75300 - protein, 1259 aa, Salmonella typhimurium
MSLWKKISLGVLIFIVVLLASVAFLVGTTTGLHLVFSAANRWVPGLEIGQVTGGWRDLSLKNIRYEQPGVAVNAGEIHLAIGLDCLWRSSLCVNDLALKDINVAIDSKKMPPSEPAQEEEESGPLNLSTPWPITLSRVALNNINIKIDDTTVSVLDFTSGLAWQEKNLTLKPTRLQGLLIALPKVADVAQEEVVEPKIEKPQPDEKPLGETLKDLFAKPVMPEMTDVHLPLNLNIESFRGEQLRITGDTDLTVRTMLLKVSSIDGNMKLDTLDIDANQGTVKASGTAQLANNWPVDITLNSTLNIDPLKGEKIKLKVGGALREQLEVGVNLSGPMDVALRAQTRLAEAGLPLNLEVVSQRIAWPLTGDTQFQADDLKLKLSGKMTDYTLSMRTAVKGQDIPPATITLDAKGNERQINLDKLTVAALEGKTELKALVDWQQAISWRGELTLNGINTAKEIPDWPAKLNGVMKTKGSLYGGTWQMDVPELKLTGNVKQNSVNVNGTLKGNSYMQWTIPGLHFALGPNSADIKGELGVKELNLDAAIDAPGLDNALPGLGGMAKGIVKVRGTVEAPQLLADITARGLRWQELSVAQARIEGDIKSTDQIAGHLNVRVERISQPDVNINLVTLDAKGSEKQHQLQLRVQGEPVSGQLSLTGSFDREAARWKGTLSDTRFQTPVGPWSLTRAIALDYRNKEQKISIGPHCWLNPNAELCIPQTIDAGAAGRAVVNLNRFDLAMLKPFMPDTTQASGIFSGKADVSWDTTQEGLPQGKVTLSGRNVKVTQTVNDAPLPVAFETLNLSADLHNNRAELGWLIRLTNNGQFDGQVQVTDPQGRRNLGGNVNMRNLNLAMVNPVFSRGEKAAGMLNARLRLGGDVQSPQLFGQLQLSALDIDGNFMPFEMQPSQLTMNFSGTRSTLAGIVRTQQGQINLNGNADWSQIDNWRARVTAKGSRVRITVPPMVRLDVSPDVVFDATPSLFTLDGRVDVPWARIVVHDLPESAVGVSSDVVMLNNDLQPETPQTASIPINSNLTVHVGNNVRIDAFGLKARLTGDLKVAQDKQGLGLNGQINIPDGRFRAYGQDLLVRKGELLFSGPPDQPLLNIEAIRNPDATEDDVIAGVRVTGTADEPKAEIFSDPAMPQAEALSYLLRGQGLDSNQSDSAAMTSMLIGLGVAQSGQVVGKIGETFGVSNLALDTQGVGDSSQVVVSGYVLPGLQVKYGVGIFDSLATLTLRYRLMPKLYLEAVSGVDQALDLLYQFEF

SEQ ID NO: 75301 - protein, 188 aa, Salmonella typhimurium
VAKFVPAIFLDRDGTINVDHGYVHEIDAFEFIDGVIDAMRELKKMGYALVVVTNQSGIARGKFTEAQFETLTEWMDWSLADRDVDLDGIYYCPHHPQGSIEEFRQVCDCRKPHPGMLISARDFLHIDMAASYMVGDKLEDMQAAAAANVGTKVLVRTGKPVTAEAENAADWVLNSLADLPSAIKKQQK

SEQ ID NO: 75302 - protein, 267 aa, Salmonella typhimurium
MTIPAFGLGTFRLKDDVVIASVKTALELGYRAVDTAQIYDNEAAVGQAIAESGVPRNELYITTKIWIENLSKDKLIPSLKESLKKLRTDYVDLTLIHWPSPGDAVSVEEFMQALLEAKKQGLTREIGISNFTIPLMEKAIAAVGADNIATNQIELSPYLQNRKVVDWAKAHGIHITSYMTLAYGKALKDEVIARIAAKHNATPAQVILAWAMGEGYSVIPSSTRRENLASSLLAQDLHLDAEDKNAIAALDCNDRLVSPEGLAPAWD

SEQ ID NO: 75303 - protein, 391 aa, Salmonella typhimurium
MPLALFALTISAFAIGTTEFVIVGLVPTIAQQLAISLPSAGMLVSIYALGVAIGAPVLTALTGRLPRKQLLVALMVLFTAGNLLAWQAPGYMTLIVARLLTGLAHGVFFSIGSTIATSLVPKEKAASAIAIMFGGLTVALVTGVPLGTFIGQHFGWRETFLAVSLLGVIALMSSQLLIPANIPGRAAASIRDQVKVLTHPRLLLIYAVTALGYGGVFTAFTFLAPMMQDLAGFSPAAVSWILLGYGVSVAIGNIWGGKLADKHGAVPALKFIFAALFVLLMVFQVTASTQYAALATILVMGVFAFGNVPGLQVYVVQKAEQFTPNAVDVASGLNIAAFNIGIALGSVIGGQTVEHYGLAQTPWIGALIVLVAFLLMGVSGRLDKPVRIALE

SEQ ID NO: 75304 - protein, 309 aa, Salmonella typhimurium; identical to SEQ ID NO: 73469

SEQ ID NO: 75305 - protein, 336 aa, Salmonella typhimurium
MTLKAGIVGIGMIGSDHLRRLANTVSGVEVVAVCDIVAGRAQAALDKYAIEAKDYNDYHDLINDKDVEVVIITASNEAHADVAVAALNANKYVFCEKPLAVTAADCQRVIEAEQKNGKRMVQIGFMRRYDKGYVQLKNIIDSGEIGQPLMVHGRHYNASTVPEYKTPQAIYETLIHEIDVMHWLLNEDYKTVKVYFPRQSSLVTTLRDPQLVVMETTSGINIVVEVFVNCQYGYDIHCDVTGEKGMAELPTVASAAVRKAAKYSTDILVDWKQRFIDAYDIEFQDFFDRLNAGLPPAGPTSWDGYLAAVTADACVKSQETGNTEIVELPSKPDFYK

SEQ ID NO: 75306 - protein, 70 aa, Salmonella typhimurium; identical to SEQ ID NO: 42639

SEQ ID NO: 75307 - protein, 879 aa, Salmonella typhimurium
METPVSRSALYGKLAGPLFRSLESATAFCKLRSNPWVELTHWLHQLTQQPDNDILHVLRHYQIPLSDVEKALLRQLDMLPAGASAISDFSHHIDLSVEKAWMLASVRYGDNKIRSGWLLLALLTTPELRRVLSSICAPLATLPVDELTEILPSLIETSPEAQERPYDGSGLASAIPGESSQAIPNGGQDGKSALAKYCQDMTAQARDGKIDPVTGREHEIRTMTDILLRRRQNNPLLTGEAGVGKTAVVEGFALAIAQGEVPPALREVRLLALDVGALLAGASMKGEFESRLKGLLEEAGRSPQPVILFVDEVHTLVGAGGASGTGDAANLLKPALARGTLRTIGATTWSEYKRHIEKDPALTRRFQVLQIAEPEEIPAMEMVRGLVDTLEKHHNVLILDEAVRAAVQLSHRYIPARQLPDKAISLLDTAAARVALTLHTPPASVQFLRQQLKAAEMERSLLQKQEKMGIQSDERRDALMARIFSLNNELTASESRWQRELELVHTLQELRLAESDADDKTTLQQAETALREWQGDAPVVFPEVSAAVVAAIVADWTGIPAGRMVKDEASQVLELPARLAQRVTGQDGALAQIGERIQTARAGLGDPRKPVGVFMLAGPSGVGKTETALALAEAIYGGEQNLVTINMSEFQEAHTVSTLKGAPPGYVGYGEGGVLTEAVRRHPWSVVLLDEIEKAHHDVHELFYQVFDKGGMEDGEGTHVDFKNTTLLLTTNVGSDLISQMCEDPALMPDATGLKEALMPELRKHFPAAFLGRVTVIPYLPLDETSRGVIARLHLDRLVARMSEQHGVTLTYSEELVAHIVACCPMHETGARLLIGYIEQHILPRLSRYWLQAMTEKAAIRQIDIGVNGDEQIVFEIVC

SEQ ID NO: 75308 - protein, 331 aa, Salmonella typhimurium
MQPKINWIDNLRGIACLMVVMIHTTTWYITNAHSVSPLNWDIANVLNSASRVSVPLFFMISGYLFFGERCAQPRHFLRIALCLIFYSVVALAYISLFTSINVELSLKNVLQKPVFYHLWFFFAITVIYLVSPLIQVKNVSGKMLLMLMVIIGIIANPNTVPQKIGGVEWLPINLYISGDTFYYILYGILGRAIGMMETQKSSLTLICTALFIIAVFVISRGTLHELRWRGNFADTWYLYCGPMVFICAVSLFTVVKNKLNARTLPGLGLISRHSLGIYGFHALIIHALRTNGLELKRWPPLDIVWVFAATVTGSLLLSMLLQRIDKRKWVS

SEQ ID NO: 75309 - protein, 1364 aa, Salmonella typhimurium
MYEAARVDDPIYHTSALAGFLIGAIIGIAIIALAAFAFFSCGFLAGLILGFMADQIASGVLQLGEAIGRSIHHTAGKILTGSENVSTNSRPAARAVLSTVKCDNHIAEKRIAQGSENIYINSQPAARKDDHTECDAVIEDGSPNVFLGGGTQTVLEISSEIPDWLRKVVDVLFVVASLLGGLAGAWRQAAKLGTKFGTKCAAKFIGGELVGMAVGEAISGLFSNPVDVTTGQKILLPETDFTLPGRLPVTCSRFYASHLETVGLLGRGWRLNWETSLRDDDEHITLTGVQGRELRYPKTMLTPGHQIFDPEEQLYLSRLHDGRYVLHYTDRSYYVFGDFDSDGMAYLLFMETPHRQRIVFGHEGGRLVRIASSSGHHLLLHRTQTPAGERLSRIELVQGGTRGNLVEYRYDDNGQLTGVVNRAGTQVRQFAYENGLMTAHSNATGFTCRYRWQELDGAPRVTEHDTSDGEHYRFDYDFAAGTTTVTGRQGETWQWWYDRETYITAHRTPGGGMYRFTYNEDHFPVNIELPGGRTVAYEYDIQNRVVKTTDPEGRVTQTQWNGEFDEITRTALDDDAVWKTQYNAHGQPVQETDPEGRVTQYAYDEQGQMCSRTDAAGGTVVTAFDSRGQMTRYTDCSGRSTGYDHDEDGNLTRVTDAEGKVVRISYNRLGLPETVNSPGKQQDRYTWNALGLMSSHRRITGSVESWRYTPRGLLAAHTDEEKRETRWQYTPEGRVAALTNGNGAQYRFSHDADGRLVREVRPDGLSRTFILDDSGYLTAIQTTGTQGGVRRETQQRDALGRLLRTENEHGQRTFSYNRLDQITAVTLTPTEAGQQQHRMQADTVRFEYDRSGWLTAEHAGNGSICYQRDALGNPTDITLPDGQHLTHLYYGSGHLLQTALDGLTVSEYERDSLHRQIMRTQGQLATYSGYDDDGLLSWQRSLASGSAPVLPGQRPARQGCVTSRDYYWNNHGEVGTIDDGLRGSVVYSYDRSGYLTGRSGQMYDHDRYYYDKAGNLLDNEGQGAVMSNRLPGCGRDRYGYNEWGELTTRRDQQLEWNAQGQLTRVISGNTETHYGYDALGRRTRKATYGRHTGHTARSRTDFVWEGFRLLQENVQQQGWRTYLYDAEQPYTPVASVTGRGESRQVWYYHTDVTGTPQEVTAADGTLVWAGYIRGFGENAADISNSGAYFHQPLRLPGQYFDDETGLHYNLFRYYAPECGRFVSQDPIGLRGGLNLYQYAPNPLKYIDPLGLTATVGRWMGPAEYQQMLDTGTVVQSSTGTTHVAYPADIDAFGKQAKNGAMYVEFDVPEKSLVPTNEGWAKIVGPDSIEGRLAKRKGLPVPEMPTAENITVRGEKINGEVEAKC

SEQ ID NO: 75310 - protein, 246 aa, Salmonella typhimurium
VQQQGWRTYLYDAEQPYTPVASVTGKGESRQVWYYHTDVTGTPQEVTAADGTLVWAGYIKGFGENAADISNSGAYFHQPLRLPGQYFDDETGLHYNLFRYYAPECGRFVSQDPIGLAGGLNLYQYAPNPIRWIDPLGLAILEHQSNFDAARRTGFENAGMTNPEDVTFSKVDPKTGTVVEFKGPNGAKVAYDAPHADMDVTAGHDKPHVGWQSAGKRGSGGANRGNITYDGPQHPHRSDSKGDDKC

SEQ ID NO: 75311 - protein, 273 aa, Salmonella typhimurium
MSYARHLPVLMYHHVSDKPGQITLSPRTFRAQMKWLAESGWKTVTAAEVEAFYHGARLPRKSVMLTFDGGWLDNWLQVFPVLQEFNLHAHLFLVTSLISDGPVRIPAGEPVYSHDECQMLVKQGRADEVMLRWSEVREMHLSGLVEFHSHTHTHRRWDQKPVSRNPSDLLRVDILLSRKRMREMLGYCSQHLCWPEGWYCSDYIHVAEELGFTYLYTTERRMNNPVIGSQRIGRINAKERKNVGWLKRRLFYHTTPGFSSLLARHKGARRIAD

SEQ ID NO: 75312 - protein, 416 aa, Salmonella typhimurium
MTFSLFGDKFTRHSGITRLMEDLNDGLRTPGAIMLGGGNPAHIPAMQDYFQTLLTDMVESGKAADALCNYDGPQGKTALLNALAVLLRETLGWDIEPQNIALTNGSQSAFFYLFNLFAGRRADGSTKKVLFPLAPEYIGYADSGLEDDLFVSARPNIELLPEGQFKYHVDFEHLHIGEETGMICVSRPTNPTGNVITDEELMKLDRLANQHNIPLVIDNAYGVPFPGIIFSEARPLWNPNIILCMSLSKLGLPGSRCGIIIANDKTITAIANMNGIISLAPGGMGPAMMCEMIKRNDLLRLSETVIKPFYYQRVQQTIAIIRRYLSEERCLIHKPEGAIFLWLWFKDLPITTELLYQRLKARGVLMVPGHYFFPGLDKPWPHTHQCMRMNYVPEPDKIEAGVKILAEEIERAWREG

SEQ ID NO: 75313 - protein, 855 aa, Salmonella typhimurium
MNESFDKDFSNHTPMMQQYLKLKAQHPEILLFYRMGDFYELFYDDAKRASQLLDISLTKRGASAGEPIPMAGIPHHAVENYLAKLVNQGESVAICEQIGDPATSKGPVERKVVRIVTPGTISDEALLQERQDNLLAAIWQDGKGYGYATLDISSGRFRLSEPADRETMAAELQRTNPAELLYAEDFAEMALIEGRRGLRRRPLWEFEIDTARQQLNLQFGTRDLVGFGVENASRGLCAAGCLLQYVKDTQRTSLPHIRSITMERQQDSIIMDAATRRNLEITQNLAGGVENTLAAVLDCTVTPMGSRMLKRWLHMPVRNTDILRERQQTIGALQDTVSELQPVLRQVGDLERILARLALRTARPRDLARMRHAFQQLPELHAQLETVDSAPVQALRKKMGDFAELRDLLERAIIDAPPVLVRDGGVIAPGYHEELDEWRALADGATDYLDRLEIRERERTGLDTLKVGYNAVHGYYIQISRGQSHLAPINYVRRQTLKNAERYIIPELKEYEDKVLTSKGKALALEKQLYDELFDLLLPHLADLQQSANALAELDVLVNLAERAWTLNYTCPTFTDKPGIRITEGRHPVVEQVLNEPFIANPLNLSPQRRMLIITGPNMGGKSTYMRQTALIALLAYIGSYVPAQNVEIGPIDRIFTRVGAADDLASGRSTFMVEMTETANILHNATENSLVLMDEIGRGTSTYDGLSLAWACAENLANKIKALTLFATHYFELTQLPEKMEGVANVHLDALEHGDTIAFMHSVQDGAASKSYGLAVAALAGVPKEVIKRARQKLRELESISPNAAATQVDGTQMSLLAAPEETSPAVEALENLDPDSLTPRQALEWIYRLKSLV

SEQ ID NO: 75314 - protein, 416 aa, Salmonella typhimurium
MLEQMGIAAKAASYKLALLSSGEKNRVLEKIADELEAQMESILSANVQDVEQARANGLSEAMLDRLALTPARLKAIADDVRQVCNLADPVGQVIDGGLLDSGLRLERRRVPLGVVGVIYEARPNVTVDVASLCLKTGNAVILRGGKETYRTNAATVRVIQKALKACGLPEAAVQAIDNPDRSLVNEMLRMDKYIDMLIPRGGAGLHKLCREQSTIPVITGGIGVCHIFVDSSADIAPALKIIVNAKTQRPSTCNTVETLLVHQDIAERFLPALSKQMAESGVTLHGDETVMQVLHGPAKLVPLKPEELDNEFLSLDLNVVVVENMDGAIAHIREHGTQHSDAILTCDMHNAARFVNEVDSAAVYVNASTRFTDGGQFGLGAEVAVSTQKLHARGPMGLEALTTYKWIGFGDGTIRA

SEQ ID NO: 75315 - protein, 413 aa, Salmonella typhimurium
MKGSNTFRWAIAIGVVVAAAAFWFWHSRSESPTAAPGVAAQAPHTASAGRRGMRDGPLAPVQAATATTQAVPRYLSGLGTVTAANTVTVRSRVDGQLIALHFQEGQQVNAGDLLAQIDPSQFKVALAQAQGQLAKDNATLANARRDLARYQQLAKTNLVSRQELDAQQALVNETQGTIKADEANVASAQLQLDWSRITAPVSGRVGLKQVDVGNQISSSDTAGIVVITQTHPIDLIFTLPESDIATVVQAQKAGKALVVEAWDRTNSHKLSEGVLLSLDNQIDPTTGTIKIKARFTNQDDTLFPNQFVNARMLVDTEQNAVVVPAAAVQMGNEGHFVWVLNDENNVSKKRVKIGIQDNRNVVISAGLSAGDRVVTDGIDRLTEGAKVEVVEPQTTVADEKSPSRHEGQKGARA

SEQ ID NO: 75316 - protein, 1040 aa, Salmonella typhimurium
MQVLPPGSTGGPSRLFILRPVATTLLMAAILLAGIIGYRFLPVAALPEVDYPTIQVVTLYPGASPDVMTSAVTAPLERQFGQMSGLKQMSSQSSGGASVVTLQFQLTLPLDVAEQEVQAAINAATNLLPSDLPNPPIYSKVNPADPPIMTLAVTSNSMPMTQVEDMVETRVAQKISQVSGVGLVTLAGGQRPAVRVKLNAQAVAALGLTSETVRTAITGANVNSAKGSLDGPERAVTLSANDQMQSADEYRRLIIAYQNGAPVRLGDVATVEQGAENSWLGAWANQAPAIVMNVQRQPGANIIATADSIRQMLPQLTESLPKSVKVTVLSDRTTNIRASVRDTQFELMLAIALVVMIIYLFLRNIPATIIPGVAVPLSLIGTFAVMVFLDFSINNLTLMALTIATGFVVDDAIVVIENISRYIEKGEKPLAAALKGAGEIGFTIISLTFSLIAVLIPLLFMGDIVGRLFREFAVTLAVAILISAVVSLTLTPMMCARMLSQQSLRKQNRFSRACERMFDRVIASYGRGLAKVLNHPWLTLSVAFATLLLSVMLWIVIPKGFFPVQDNGIIQGTLQAPQSSSYASMAQRQRQVAERILQDPAVQSLTTFVGVDGANPTLNSARLQINLKPLDARDDRVQQVISRLQTAVATIPGVELYLQPTQDLTIDTQVSRTQYQFTLQATTLDALSHWVPKLQNALQSLPQLSEVSSDWQDRGLAAWVNVDRDSASRLGISMADVDNALYNAFGQRLISTIYTQANQYRVVLEHNTASMPGLAALETIRLTSRDGGTVPLSAIARIEQRFAPLSINHLDQFPVTTFSFNVPESYSLGDAVQAILDTEKTLALPADITTQFQGSTLAFQAALGSTVWLIVAAVVAMYIVLGVLYESFIHPITILSTLPTAGVGALLALIIAGSELDIIAIIGIILLIGIVKKNAIMMIDFALAAEREQGMSPRDAIFQACLLRFRPILMTTLAALLGALPLMLSTGVGTELRRPLGIAMVGGLLVSQVLTLFTTPVIYLLFDRLSLYVKSRFPRHKEEA

SEQ ID NO: 75317 - protein, 1026 aa, Salmonella typhimurium
MRFFALFIYRPVATILIAAAITLCGILGFRLLPVAPLPQVDFPVIMVSASLPGASPETMASSVATPLERSLGRIAGVNEMTSSSSLGSTRIILEFNFDRDINGAARDVQAAINAAQSLLPGGMPSRPTYRKANPSDAPIMILTLTSESWSQGKLYDFASTQLAQTIAQIDGVGDVDVGGSSLPAVRVGLNPQALFNQGVSLDEVREAIDSANVRRPQGAIEDSVHRWQIQTNDELKTAAEYQPLIIHYNNGAAVRLGDVASVTDSVQDVRNAGMTNAKPAILLMIRKLPEANIIQTVDGIRAKLPELRAMIPAAIDLQIAQDRSPTIRASLQEVEETLAISVALVILVVFLFLRSGRATLIPAVAVPVSLIGTFAAMYLCGFSLNNLSLMALTIATGFVVDDAIVVLENIARHLEAGMKPLQAALQGTREVGFTVISMSLSLVAVFLPLLLMGGLPGRLLREFAVTLSVAIGISLVVSLTLTPMMCGWMLKSSKPRTQPRKRGVGRLLVALQQGYGTSLKWVLNHTRLVGVVFLGTVALNIWLYIAIPKTFFPEQDTGVLMGGIQADQSISFQAMRGKLQDFMKIIRDDPAVNNVTGFTGGSRVNSGMMFITLKPRGERKETAQQIIDRLRVKLAKEPGARLFLMAVQDIRVGGRQANASYQYTLLSDSLAALREWEPKIRKALSALPQLADVNSDQQDNGAEMNLIYDRDTMSRLGIDVQAANSLLNNAFGQRQISTIYQPMNQYKVVMEVDPRYSQDISALEKMFVINRDGKAIPLSYFAQWRPANAPLSVNHQGLSAASTIAFNLPTGTSLSQATEAINRTMTQLGVPSTVRGSFSGTAQVFQQTMNSQLILIVAAIATVYIVLGILYESYVHPLTILSTLPSAGVGALLALELFNAPFSLIALIGIMLLIGIVKKNAIMMVDFALEAQRSGGLTPEQAIFQACLLRFRPIMMTTLAALFGALPLVLSGGDGSELRQPLGITIVGGLVMSQLLTLYTTPVVYLFFDRLRLRFSRKNSKPVVEI

SEQ ID NO: 75318 - protein, 467 aa, Salmonella typhimurium
MKVWRPGITGKLFLAIFATCIVLLISMHWAVRVSFERGFIDYIKHGNEQRLQMLGDALGDQYQQHGNWRFLRNNDRFVFQILRSFEHDNDRDKPGPGMPPHGWRTQFWVVDQNGRVLVGPRGPVPHDGTRRPILVNDVEVGAIIASPVERLTRNTDINFDMQQRRASWMIVALSTLLAALATFLLARGLLAPVKRLVEGTHRLAAGDFTTRVTPTSADELGKLAQDFNQLASTLEKNQQMRRDFMADISHELRTPLAVLRGELEAIQDGVRQFTPESVTSLQAEVGTLTKLVDDLHQLSLSDEGALAYQKTTVDLVPLLEVAGGAFRERFTSRGLTLHYALPDSMTVFGDPDRLMQLFNNLLENSLRYTDSGGGLHISAEQRDKSLFLTFADSAPGVSDEQLQKLFDRFYRTEVSRNRASGGSGLGLAICVNIVHAHNGHLHAAHSPFGGVSITVELPLDRDLQREV

SEQ ID NO: 75319 - protein, 453 aa, Salmonella typhimurium
MFKPELLSPAGTLKNMRYAFAYGADAVYAGQPRYSLRVRNNEFNHENLQLGINEAHALGKKFYVVVNIAPHNAKLKTFIRDLKPVVEMGPDALIMSDPGLIMLVREHFPAMPIHLSVQANAVNWATVKFWQQMGLTRVILSRELSLEEIEEIRQQVPDMEIEIFVHGALCMAYSGRCLLSGYINKRDPNQGTCTNACRWEYNVQEGKEDVVGNIVHKHEPIPVQNVEPTLGIGAPTDKVFMIEEAQRPGEYMTAFEDEHGTYIMNSKDLRAIAHVERLTKMGVHSLKIEGRTKSFYYCARTAQVYRKAIDDAAAGKPFDPTLLETLEGLAHRGYTEGFLRRHTHDDYQNYEYGYSVSERQQFVGEFTGERKGQLAAVAVKNKFSVGDSLELMTPQGNINFTLEQMENAKGDAMPVAPGDGYTVWMPVPQDVTLDYALLMRNFSGESTRNPHAK

SEQ ID NO: 75320 - protein, 299 aa, Salmonella typhimurium
MANFPASLLILNGKSADNQPLREAITLLRDEGIQIHVRVTWEKGDAQRYVDEARRLGVETVIAGGGDGTINEVSTALIQIRDGVAPALGLLPLGTANDFATSAGIPEALDKALKLAIAGNAMEIDMAMVNDKTCFINMATGGFGTRITTETPEKLKAALGGVSYLIHGLMRMDTLTPDRCEIRGENFHWQGDALVIGIGNGRQAGGGQQLCPTALINDGLLQLRIFTGEELLPALFSTLTQSDDNPNIIDGASAWFDIHAPHEITFNLDGEPLSGQEFHIEVLPGALRCRLPPDCPLLR

SEQ ID NO: 75321 - protein, 423 aa, Salmonella typhimurium
MKTTFKLSFMMFVEWFIWGAWFVPLWLWLNKSGFSAGEIGWSYACTAIAAILSPILVGSVTDRFFSAQKVLAVLMFAGAVLMYFAAQQTTFAGFFPLLLAYSLTYMPTIALTNSIAFANVPDVERDFPRIRVMGTIGWIASGLACGFLPQMLGYNDISPTNIPLLITAASSALLGVFAFCLPDTPPKSTGKMDIKVMLGLDALVLLRDKNFLVFFFCSFLFAMPLAFYYIFANGYLTEVGMKNATGWMTLGQFSEIFFMLALPFFTKRFGIKKVLLLGLITAAIRYGFFVYGGAETYFTYALLFLGILLHGVSYDFYYVTAYIYVDKKAPVHMRTAAQGLITLCCQGFGSLLGYRLGGVMMEKMFAYPQPVNGLTFNWAGMWTFGAVMIAVIALLFMIFFRESDKEITAIDDRDIALTQGEVK

SEQ ID NO: 75322 - protein, 677 aa, Salmonella typhimurium
MTQVAKKILVTCALPYANGSIHLGHMLEHIQADVWVRYQRMRGHEVNFICADDAHGTPIMLKAQQLGITPEQMIGEMSQEHQTDFAGFNISYDNYHSTHSDENRELSELIYTRLKENGFIKNRTISQLYDPEKGMFLPDRFVKGTCPKCKSADQYGDNCEVCGATYSPTELIEPKSVVSGATPVMRDSEHFFFDLPSFSEMLQAWTRSGALQEQVANKMQEWFESGLQQWDISRDAPYFGFEIPNAPGKYFYVWLDAPIGYMGSFKNLCDKRGDTTSFDEYWKKDSDAELYHFIGKDIVYFHSLFWPAMLEGSHFRKPTNLFVHGYVTVNGAKMSKSRGTFIKASTWLKHFDADSLRYYYTAKLSSRIDDIDLNLEDFVQRVNADIVNKVVNLASRNAGFINKRFDGVLAAELADPQLYKTFTDAAAVIGEAWESREFGKAIREIMALADIANRYVDEQAPWVVAKQEGRDADLQAICSMGINLFRVLMTYLKPVLPTLSERVEAFLNSELNWDAIEQPLLGHKVNTFKALYNRIDMKQVEALVESSKEEVKAAAAPVTGPLADFPIQETITFDDFAKIDLRVALIENAEFVDGSDKLLRLTLDLGGEKRNVFSGIRSAYPDPQALIGRQTVMVANLAPRKMRFGVSEGMVMAAGPGGKDIFLLSPDDGAKPGQQVK

SEQ ID NO: 75323 - protein, 157 aa, Salmonella typhimurium
MKKDPTLQQAHDTMRFFRRGGSLRMLLDDDVTQPLNTLYRYATQLMEVKEFAGAARLFQLLTIYDAWSFDYWFRLGECCQAQKHWGEAIYAYGRAAQIKIDAPQAPWAAAECYLACDNVCYAIKALKAVVRICGEVSEHQILRQRAEKMLQQLSDRS

SEQ ID NO: 75324 - protein, 81 aa, Salmonella typhimurium
MIMDVQTIFVILAFLLLPLFCFREAWKGWRTGAVDKVVKNARKPVYVYRHADPVQYWSYLFLYTGCGFLFTGMIIYLLFYR

SEQ ID NO: 75325 - protein, 352 aa, Salmonella typhimurium
MSEKTEQPTEKKLRDGRKEGQVVKSIEITSLFQLIALYLYFHFFTEKMILILIESITFTLQLVNKPFSYALTQLSHALIESLTSALLFLGAGVIVATVGSVFLQVGVVIASKAIGFKSEHINPVSNFKQIFSLHSVVELCKSSLKVIMLSLIFAFFFYYYASTFRALPYCGLACGVLVVSSLIKWLWVGVMVFYIVVGILDYSFQYYKIRKDLKMSKDDVKQEHKDLEGDPQMKTRRREMQSEIQSGSLAQSVKQSVAVVRNPTHIAVCLGYHPTDMPIPRVLEKGSDAQANYIVNIAERNCIPVVENVELARSLFFEVERGDKIPETLFEPVAALLRMVMKIDYAHSTETP

SEQ ID NO: 75326 - protein, 213 aa, Salmonella typhimurium
MFTGIVQGTAKLVSIDEKPNFRTHVVTLPDYMLEGLETGASVAHNGCCLTVTEINGNQISFDLMKETLRITNLGALRVGDEVNVERAAKFSDEIGGHLMSGHIITTAEIAKILTSENNHQVWFKVQDASLMKYILYKGFIGVDGISLTVGEVTPTRFCVHLIPETLERTTLGRKKLGERVNIEIDPQTQAVVDTVERVLAARENAVRNQADIG

SEQ ID NO: 75327 - protein, 245 aa, Salmonella typhimurium
MEMLEEHRCFGGWQQRWRHHAATLNCAMTFSIFLPPTQDNEPPPVLYWLSGLTCNDENFTTKAGAQRIAAELGIVLVMPDTSPRGEQVADDSGYDLGHGAGFYLNATQPPWASHYRMYDYLRDELPALIQTQFNVSDRCAISGHSMGGHGALIMALKNPGKYTSVSAFAPIVNPSRVPWGIKALTAYLGEDESAWTEWDSCELMLASQPQDAIPVLIDQGDSDQFLADQLQPAVLAEAARKPPGR

SEQ ID NO: 75328 - protein, 285 aa, Salmonella typhimurium
MKYIGAHVSAAGGLANAPARAAEIGATAFALFTKNQRQWRAAPLTPQVIDDFKIACEKYHFSAAQILPHDSYLINLGHPVSEALEKSRDAFLDEMQRCEQLGLTLLNFHPGSHLMQIAQEDCLARIAESINIALAQTEGVTAVIENTAGQGSNLGFEFEQLAAIIDGVEDKSRVGVCIDTCHAFAAGYDLRTPEACEKTFAEFGKIVGFQYLRGMHLNDAKSAFGSRVDRHHSLGEGNIGHDAFRWIMQDGRFDGIPLILETINPDIWAEEIAWLKAQQIAEAMA

SEQ ID NO: 75329 - protein, 146 aa, Salmonella typhimurium
MKLESPLGSDLARLVRIWRALIDHRLKPLELTQTHWVTLHNIHQLPPDQSQIQLAKAIGIEQPSLVRTLDQLEDKGLISRQTCASDRRAKRIKLTEKADALIAEMEEVIHKTRGEILAGISSEEIELLIKLIAKLEHNIMELHSHD

SEQ ID NO: 75330 - protein, 393 aa, Salmonella typhimurium
MHNSPAAAAPKSFDLTSTAFLIVAFLTGIAGALQTPTLSIFLTDEVHARPGMVGFFFTGSAVIGIIVSQFLAGRSDKKGDRKKLIVFCCVLGMLACVLFAWNRNYFILLFIGVFLSSFGSTANPQMFALAREHADRTGREAVMFSSILRAQVSLAWVIGPPLAYALAMGFSFTVMYLSAAVAFIVCGVMVWFFLPSMRKDAPLATGTLEAPRRNRRDTLLLFVICTLMWGTNSLYIINMPLFIINELHLPEKLAGVMMGTAAGLEIPTMLIAGYFAKRLGKRLLMCIAVVAGLCFYVGMLLAHAPATLLGLQLLNAIYIGILGGIGMLYFQDLMPGQAGSATTLYTNTIRVGWIIAGSLAGIAAEIWNYHAVFWFALVMIVATMFCLARIKDV

SEQ ID NO: 75331 - protein, 424 aa, Salmonella typhimurium
MASSNLIKQLQERGLVAQVTDEDALAERLAQGPIALYCGFDPTADSLHLGHLVPLLCLKRFQQAGHKPVALVGGATGLIGDPSFKAAERKLNTEETVQEWVAKIRKQVAPFLDFDCGENSAIAANNYDWFGSMNVLTFLRDIGKHFSVNQMINKEAVKQRLNRDDQGISFTEFSYNLLQGYDFACLNKLHGVALQIGGSDQWGNITSGIDLTRRLHQNQVFGLTVPLITKADGTKFGKTEGGAVWLDPKKTSPYKFYQFWINTADADVYRFLKFFTFMDIEEINALEEEDKNSGKAPRAQYVLAEQVTRLVHGEEGLVAAKRITECLFSGSLSALSEADFEQLAQDGVPMVEMEKGADLMQALVDAELQPSRGQARKTIASNAVTINGEKQSDPEYIFNDEDRLFGRYTLLRRGKKNYCLICWK

SEQ ID NO: 75332 - protein, 637 aa, Salmonella typhimurium
VRFPNQRLAQLFAMLQNETLPQDELAQRLSVSTRTVRADIAALNMLLTPHGAQFTLSRGNGYQLKIDDPARYQSLQTQQSPALARGPRTSQERIHYLLARFLTSAFSLKLEDLADEWFVSRATLQNDMADVREHLLRYHLTLETRPRHGMKLFGGEMAIRACLTDLLWTLAQQEPSHPLIVSTTLNTEVSQRLRSLLPDIFSHCQIRLTDEGELFLRLYCAVAVRRIREGYPLSECVAEEVDEKVRHAAHEIAELLQQLADKPLSEPEVSWLKVHIAARQVQEIAPSAINADDEEALVHYILNFINTQYNYNLLNDKQLHADLLTHIKTMITRVRYQIMIPNPLLENIKQHYPMAWDMTLAAISSWGKYTPYTISENEIGFLVLHIGVGLERSYNIGYQRQPQVLLVCDAGNAMVRMIEAVLARKYPQIEIALTLTLRDYEARDSIVEDFVISTARIGEKDKPVIMIAPFPTDYQLEQIGKLVLVDRTRPWMLDKYFDASHFRIVEGEIDQQTLFKTLCDQLHEEGFVDAAFLDSVIEREAIVSTLLGDGIALPHALGLLAKKTVVYTVLAPQGIAWGDETAHVIFLLAISKSEYEEAMAIYDIFVTFLRERAMTRLCACQNFTQFKTVAMECVSRF

SEQ ID NO: 75333 - protein, 902 aa, Salmonella typhimurium
MLKIITRQLFARLNRHLPYRLVHRDPLPGAQTAVNATIPPSLSERCLKVAAMEQETLWRVFDTHPEGLNAAEVTRAREKHGENRLPAQKPSPWWVHLWVCYRNPFNILLTILGGISYATEDLFAAGVIALMVGISTLLNFVQEARSTKAADALKAMVSNTATVLRVINENGENAWLELPIDQLVPGDIIKLAAGDMIPADLRIIQARDLFVAQASLTGESLPVEKVAATREPRQNNPLECDTLCFMGTNVVSGTAQAVVMATGAGTWFGQLAGRVSEQDNEQNAFQKGISRVSMLLIRFMLVMAPVVLIINGYTKGDWWEAALFALSVAVGLTPEMLPMIVTSTLARGAVKLSKQKVIVKHLDAIQNFGAMDILCTDKTGTLTQDKIVLENHTDISGKPSEHVLHCAWLNSHYQTGLKNLLDTAVLEGVDETAARQLSGRWQKIDEIPFDFERRRMSVVVAEDSNVHQLVCKGALQEILNVCTQVRHNGDIVPLDDNMLRRVKRVTDTLNRQGLRVVAVATKYLPAREGDYQRIDESDLILEGYIAFLDPPKETTAPALKALKASGITVKILTGDSELVAAKVCHEVGLDAGDVIIGSDIEGLSDDALAALAARTTLFARLTPMHKERIVTLLKREGHVVGFMGDGINDAPALRAADIGISVDGAVDIAREAADIILLEKSLMVLEEGVIEGRRTFSNMLKYIKMTASSNFGNVFSVLVASAFLPFLPMLPLHLLIQNLLYDVSQVAIPFDNVDEEQIQKPQRWNPADLGRFMVFFGPISSIFDILTFCLMWWVFHANTPETQTLFQSGWFVVGLLSQTLIVHMIRTRRLPFIQSRAAWPLMAMTLLVMVVGVSLPFSPLASYLQLQALPLSYFPWLIAILVGYMTLTQLVKGFYSRRYGWQ

SEQ ID NO: 75334 - protein, 498 aa, Salmonella typhimurium
MSNYWLGLDCGGSWLKAGLYDGAGREVAVQRLPLHALSPQPGWVERDMTELWQQCASVISKLLAHTGVSGSQIRGLGISAQGKGLFLLDKSDRPLGKAILSSDRRAMEIVQRWQKEAVPQKLYPLTRQTLWTGHPVSLLRWVKENEPQRYAQIGCVMMTHDYLRWCLTGVKGCEESNISESNLYNMATGQYDPRLTEWLGISEIDSALSPVVGSAEICGEITAQAAAITGLAAGTPVVGGLFDVVSTALCAGIEDESTLNAVMGTWAVTSGIAHGLRDHEAHPYVYGRYVNDGQYIVHEASPTSSGNLEWFTAQWGDLSFDEINQAVASLPKAGSDLFFLPFLYGSNAGLEMTCGFYGMQALHNRAHLLQALYEGVVFSHMTHLNRMRERFTEVCALRVTGGPAHSDVWMQMLADVSGLRIELPQVEETGCFGAALAARVGTGVYRDFREAQRDLQHPVRTLLPDMTAHALYQRKYRQYQDLIEALQGYHARIKEHAL

SEQ ID NO: 75335 - protein, 270 aa, Salmonella typhimurium
MTVRQRLLSYFFNRLRMNYPQILSPVLNFLHCPTPQAWIVQARDPQNLPLLLTDHLICELKAAQTALLLVRKYVADKSGADALLSWLQPYEAFAFRQGPEPDFVALHKQISKSAMPQTDDPWGRQLIDRMVLLIKEELHHFWQVREVMQARNIPYVKITASRYAKGMLKAVRTHEPLTLIDKLICGAYIEARSCERFAALAPWLDEDLQTFYLSLLRSEARHYQDYLALAQQISAEDISARVRYFGEVEADLILSPDREFRFHSGVPAAG

SEQ ID NO: 75336 - protein, 382 aa, Salmonella typhimurium
MKALHFGAGNIGRGFIGKLLADAGIQLTFADVNQVVLDALNARHSYQVHVVGENEQVDTVSGVNAVSSIGDDVVDLIAHVDLITTAVGPVVLERIAPAIAKGLVKRKAQGVDAPLNIIACENMVRGTTQLKGHVMNALADGDKAWVEQHVGFVDSAVDRIVPPSASATNDPLEVTVETFSEWIVDKTQFKGALPNIPGMELTDNLMAFVERKLFTLNTGHAITAYLGKLAGHQTIRDAILDESIRAVVKGAMEESGAVLIKRYGFDADKHAAYIQKILGRFENPYLKDDVERVGRQPLRKLSAGDRLIKPLLGTLEYGLPHVNLVKGIAAAMHFRSDEDPQAQELAALITEKGPQAALAQISGLDANSDVVAEAVNAYNATK

SEQ ID NO: 75337 - protein, 395 aa, Salmonella typhimurium
MNNVISSKDNHNHTLVFTGKGGKYFVICLVNFLLTCITLGIYAPWAMVKCRRYIYTNMTLNNQPFAYKATGGALFISVLLVFIIYIVSLSLIEHGHPGLGFTLFGLLIAIIPFMAVKGLQYQAMMTSLNGVHFGFQCSMRRAWWYMFALPVLLMVALYIVLYIISLVTIAVGGLVFSIVFLGLLAIIGIGVINGITYSKWMTLFGNGANFGIHRFSIQVNVKTCIRGCVLAMLTLFPFAVVIGYLIAPVFTDMILLSMMGNAQAGGALILQYYGQIMACYFLYFLAIIVVTSYLYVALRNLFLNNLSLANDSIRFHSSVTAHGMLWRLLVVFVISGVTLGLAYPWLKIWLVSWLAQNTQVQGDLDSLELTNDEKPLENSPLMWISRGIMPYFPFI

SEQ ID NO: 75338 - protein, 196 aa, Salmonella typhimurium
MTQNPAQVSLRPNNRLSDMQAIMEQTQAFENRVLERLNAGKTVRSFLITAVELLTEAVNILVLQVFRKDDYAVKYAVEPLLDGDGPLGDLSVRLKLIYGLGVLSRTEYEDAELLMALREELNHDGNEYAFTDDEILGPFGELHCVMALPPPPHFDTSDAALYAMQIQRYQQAVRSTMVLSLTELISKISLKKAFQK

SEQ ID NO: 75339 - protein, 1461 aa, Salmonella typhimurium
MNRIFKVLWNAATGTFVVTSETAKSRGKKNGRRKLAVSALIGLSSIMVSADALANAGNDTGDGVTPTGTQTGGKGWIAIGTDATANTYTNVDGASAAMGYKASAMGKWSTAIGSYSQSTGDSSLALGVKSVSAGDRAIAMGASSSASGSYSMAMGVYANSSGAKSVALGYKSVASGATSSALGYQATASGDDSAAFGNGAKAIGTNSVALGSGSVAQEDNSVAVGNSTTQRQITYVAKGDINSTSTDAVTGAQIYSLSQSVADRLGGGASVNSDGTVNAPLYEVGTGIYNNVGSALSALNTSITNTEASVAGLAEDALLWDESISAFSASHTGNASKITNLAAGTLAADSTDAVNGSQLFDTNEKVDKNTADIATNTGSINQNTADITANTDSINQNTTDIAANTTSINQNTTDIATNTTNINSLSDSVTTLTDDALLWDAASGAFSAKHNGSDSKITNLAAGTLAADSTDAVNGSQLFDTNEKVDQNTADITTNTNSINQNTTDIATNTTNINNLSDSITTLTDDALLWDAASGAFSANHNGSASKITNLAAGTLAADSTDAVNGSQLFATNENVSQNTADITTNTNSINQNTTDIATNTTSINNLSDSITTLTDDALLWDAASGTFSASRSGSASKITNLAAGTLAADSTDAVNGSQLYETNQKVDQNTSAIADINTSITNLSSDNLSWNETTSSFSASHGSSTTNKITNVAAGELSEESTDAVNGSQLFETNEKVDQNTTDIAANTTNITQNSTAIENLNTSVSDINTSITGLTDNALLWDEDTGAFSANHGGSTSKITNVAAGALSEDSTDAVNGSQLYETNQKVDQNTSAIADINTSITNLGTDALSWDDEEGAFSASHGTSGTNKITNVAAGEIASDSTDAVNGSQLYETNMLISQYNESISQLAGDTSETYITENGTGVKYIRTNDNGLEGQDAYATGNGATAVGYDAVASGAGSLALGQNSSSSIEGSIALGSGSTSNRAITTGIRETSATSDGVVIGYNTTDRELLGALSLGTDGESYRQITNVADGSEAQDAVTVRQLQNAIGAVTTTPTKYYHANSTEEDSLAVGTDSLAMGAKTIVNADAGIGIGLNTLVMADAINGIAIGSNARANHANSIAMGNGSQTTRGAQTDYTAYNMDTPQNSVGEFSVGSEDGQRQITNVAAGSADTDAVNVGQLKVTDAQVSRNTQSITNLNTQVSNLDTRVTNIENGIGDIVTTGSTKYFKTNTDGADANAQGADSVAIGSGSIAAAENSVALGTNSVADEANTVSVGSSTQQRRITNVAAGVNNTDAVNVAQLKASEAGSVRYETNADGSVNYSVLNLGDGSGGTTRIGNVSAAVNDTDAVNYAQLKRSVEEANTYTDQKMGEMNSKIKGVENKMSGGIASAMAMAGLPQAYAPGANMTSIAGGTFNGESAVAIGVSMVSESGGWVYKLQGTSNSQGDYSAAIGAGFQW

SEQ ID NO: 75340 - protein, 396 aa, Salmonella typhimurium
MIISAASDYRAAAQRTLPPFLFHYIDGGAYAEYTLRRNVEDLSQVALRQRVLKNMSDLSLETTLFNETLSMPVALAPVGLCGMYARRGEVQAAAAADAKGIPFTLSTVSVCPIEEVAPTIKRPMWFQLYVLRDRGFMRNALERAKAAGCSTLVFTVDMPTPGARYRDAHSGMSGPNAAMRRYWQAVMHPKWAWDVGLNGRPHDLGNISAYLGKPTGLEDYIGWLANNFDPSISWKDLEWIREFWDGPMVIKGILDPEDARDAVRFGADGIVVSNHGGRQLDGVLSSARALPAIADAVKGDIAILADSGIRNGLDVVRMIALGADTVLLGRAYLYALATAGKAGVANLLDLIEKEMKVAMTLTGAKSISEISGDSLVQELGKSLPAALAPMSKGDAA

SEQ ID NO: 75341 - protein, 412 aa, Salmonella typhimurium
LCMKNNIEETIGKYLPILMILPLAGLAELASLYSIQALLPKLSEVYNIPLNQVGMILSAEVGFLALAMLFSGTLSDRFGRKPIIFYSLLAGGILTLLCATASSWPMLVVYRALLGIAVSGITAAVTVYISEEVSPALAGIVTGYFIFGNSLGSMSGRVFATLMMEHVSIDTIFFIFGGVLIAMALAVKLFLPTSRQFVPTPSLQLGAVLKGGLEHFKNIRVSLCFVIGFILFGSFTSIFNFLAFYLHRPPYELSYTWIGLIPVSFSLTFFLAPYAARVALNIGSMNALSMLIICMMVGAFLTLIAPSLWVFISGIVLLSVAFFSAHSTVLAWVSSRSPNAKGQATSFYLLCYYSGGAVMGYLNGYLFSWQGWNAIAASCLMMLGIGLFICRFIFAKYEKQPQIKKQSVQESF

SEQ ID NO: 75342 - protein, 473 aa, Salmonella typhimurium
MSAKTLYEKLVESHTIRELDNEGHVLLYIDRSILNEYTSPQAFSGLRERGRTVRHPDTFLLNIDHVNPTRSQRDDLMTDPGGQLQVDYFRENAADFGITLFDVLDPRQGIEHVVAHEQGLVMPGMVIAAGDSHTTTYGAFGALGFGIGTSEIEHLLATQTLVYRKLKTMRVSVQGELPFACSAKDIVLELLERIGADGATGYAIEFVGEAISALSVEGRMTLCNMAVEAGARGAIIAPDKKVFDYIYGKPQMPVGELWQQALLEWSQLSSDADAVFDKTVAINCHDLEPKVTWGISPDQTGSITGRVPFPEQETNPLKRLALEKALHYMGLTAGMLLKDIRISHAFIGSCTNGRIEDLRAVAKVLEGRKIASHVRGIIVPGSTMVRRQAEEEGLAKIFIAAGFEWRQSGCSMCLAMNEDVLSPGDRCASGTNRNFPGRQGAGARTHLMSPAMVAAAAVAGHLVDVRSLLQAGE

SEQ ID NO: 75343 - protein, 292 aa, Salmonella typhimurium
MKLVQYLVNGGKRYGIMQETGIIDLSQRLGDKYPTLKSLLCANALTDAALWCDEPADYYYQEVTFLPVIDDPQKIICVGMNYADKRIEFNETNPAPTLFVRFADSQTGHNGLLLKPENTNEFDYEGELAVVIGRRCSRVSAEDALDYVAGYSCYMDGSVRDWQHSWFTAGKNWPSTGSFGPCLVTTDDIPDPQMLRLLTRLNGREVQNESTANMIHPIASLIAYISTFTLLSPGDTILTGSPGGVGKKRVPPLFLHDGDVIEVEIEHIGTLRNVVRDSRYLTSSVSWHDGRK

SEQ ID NO: 75344 - protein, 304 aa, Salmonella typhimurium
MSTLIECGASPFIPGFALKDVRLENGLTVRVAIGGSGSPLVLLHGHPQNHTTWRKVAPTLAQNHTVILPDLRGYGDSDKPTSDPAHRTYSKRTMAQDIVMLMDALGFSRFAFVGHDRGGRVGHRLALDYPDRVTCCTFIDIAPTATMYALTDKSFATRYFWWFFLIQPFPLPETMIAHDPAFFLRKHISGQLKIEGATSQEAFNEYLRCYQNPEMIHAICEDYRAAATIDLDDDAADTSARIRCPLQLLWGGLGTVGQLYNVVGTWKEKALNVQGEALPCGHSPQEECPEYFIQKLQSFLHSVL

SEQ ID NO: 75345 - protein, 157 aa, Salmonella typhimurium
MLNIVLFEPEIPPNTGNIIRLCANTGFRLHIIEPMGFTWDDKRLRRAGLDYHEFAAVQRHHDYAAFVAAENPQRLFALTTKGTPAHSAVSYQDGDYLMFGPETRGLPASILDALPKEQKIRIPMMPDSRSMNLSNAVSVVVYEAWRQLGYPGAVLRS

SEQ ID NO: 75346 - protein, 427 aa, Salmonella typhimurium
MRGKAINTIQQAVKPRTFSVRPLFYASVLSAGVLLCAFSAHADDRDQLKSIQADIAAKERDVRQQQQQRASLLAQLKAQEEAISAAARKLRETQSTLDQLNAQIDEMNASIAKLEQQKASQERNLAAQLDAAFRQGEHTGIQLILSGEESQRGQRLQAYFGYLNQARQETIAELKQTREQVATQKAELEEKQSQQQTLLYEQRAQQAKLEQARNERKKTLAGLESSIQQGQQQLSELRANESRLRNSIARAEAAAKARAEREAREAQAVRDKQQEASRKGSTYKPTESERSLMSRTGGLGAPRGQAYWPVRGPILHRYGERLQGELRWKGMVIGASEGTEVKAIADGRVILADWLQGYGLVVVVEHGKGDMSLYGYNQSALVSVGAQVRAGQPIALVGSSGGQGRPSLYFEIRRQGQAVNPQPWLGR

SEQ ID NO: 75347 - protein, 320 aa, Salmonella typhimurium
LPQFRRSILTLATLLAFAHPVFAGKLAIVIDDFGYRPHTENQVLALPPNISVAVLPNAPHAREMATKAHNSGHEVLIHLPMAPLSKQPLEKDTLRPDMSSDEIERIIREAVNNVPYAVGLNNHMGSAMTSSLFGMQKVMQALEHYNLYFLDSMTIGNSQAMRAASGTGVKVIKRKVFLDDTQNEADIRRQFNRAIELARRNGSAIAIGHPHPATVRVLQQMVYRLPADITLVRPGSLLNEPQVDTSRPGVTPQKIDAPRNPFRGVKMCKPKKPLQPVYATRFFSVIGESITQSSVVTWFQHQWQGWGKIAAPKNVSAKTD

SEQ ID NO: 75348 - protein, 120 aa, Salmonella typhimurium
MSTTLYKDFTFEAAHRLPHVPEGHKCGRLHGHSFMVRLEITGEVDPHTGWIMDFADLKAAFKPTYDRLDHYYLNDIPGLSNPTSEVLAKWIWDQVKPVVPLLSAVMVKETCTAGCVYRGE

SEQ ID NO: 75349 - protein, 317 aa, Salmonella typhimurium
MRVLIVKTSSMGDVLHTLPALTDAQQAIPGIQFDWAVEEGFAQIPSWHSAVDRVIPVAIRRWRKAWFSAPIKAERTAFRRAVCANQYDAVIDAQGLVKSAALVTRLAHGIKHGMDWSTAREPLASLFYNRKHHIAKQQHAVERTRELFAKSLGYDKPQSQGDYAIAKHFLHCQQAVSDPYAVFLHATTRDDKHWPEANWRELIGLVGNTGLRIKLPWGAPHEEARAKRLAEGFDYVDVLPRMSLEEVARVLAGAKFVVSVDTGLSHLTAALDRPNITLYGPTDPGLIGGYGKNQMACCSPEQNLANLDATSVFGKIH

SEQ ID NO: 75350 - protein, 762 aa, Salmonella typhimurium
MSQSENRHDTISLLIEGMTCASCVARVEKGIKAVPGVTDATVNLATERATVRGTASAEAVIAAIEKTGYKARPIETAGQGEDDSEEKKEAERVRLKRDLILASVLALPVFVLEMGSHLIPGMHEWVIKTIGLQQSWYWQFALTLLVLTIPGRRFYLKGFPALARLAPDMNSLVAVGTAAAFGYSLVATFTPDLLPEGTVNVYYEAAAVIVALILLGRFLEARAKGRTSEAIKRLVGLQARVAHVLREGRIVDIPVDEVVLGDCVEVRPGERIPVDGEVTEGRSFVDESMITGEPIPVEKSAGSAVVGGTVNQKGALTLRATAVGGQTMLAQIIRLVEQAQGSKLPIQAVVDKVTLWFVPMVMLIAALTFVVWLAFGPSPALTFALINGVAVLIIACPCAMGLATPTSIMVGTGRGAEMGVLFRKGEALQLLKDAKVVAVDKTGTLTEGRPVLTDLDVASGFERREVLAKVAAVESRSEHPIARAIVVSAEEEGIALPGMSGFESVTGMGVYATVDGTRVDVGADRYMREIGVDISGFATTAERLGQEGKSPLYAAIDGQLAAIIAVADPIKPSTPAAINALHQLGIKVAMITGDNARTAQAIARQLGIDDVVAEVLPEGKVEAIRRLKAAYGQVAFVGDGINDAPALAESDVGLAIGTGTDVAVESADVVLMSGNLQGVPNAIALSKATIRNIHQNLFWAFAYNTALIPVAAGALFPVWGILLSPVFAAGAMAMSSVFVLGNALRLRRFRAPMATPSDTSTT

SEQ ID NO: 75351 - protein, 257 aa, Salmonella typhimurium
MKSNTSQQRPYQEVGAMIRDLIVQTPYRPGERLPPEREIAERLNVTRTVVREALIMLEIKGLVEVRRGAGIYVLDSADNNEMEGADVNHCNDAGPFELLQARQLLESNIAEFAALQATREDIIKMRQALQLEERELASSAPGGSESGDMQFHLAIAEATHNSMLVELFRQSWQWRENNPMWLQLHSHLGDTLYRKEWLVDHKQILAALIKKDARAAKLAMWQHLENVKQRLLEFSNVDDIYFDGYLFESWPLDNVDA

SEQ ID NO: 75352 - protein, 389 aa, Salmonella typhimurium
MTDTTILQNNTHVIKPKKSVALSGVPAGNTALCTVGKSGNDLHYRGYDILDLAEHCEFEEVAHLLIHGKLPTRDELNAYKSKLKALRGLPANVRTVLEALPAASHPMDVMRTGVSALGCTLPEKEGHTVSGARDIADKLLASLSSILLYWYHYSHNGERIQPETDDDSIGGHFLHLLHGEKPTQSWEKAMHISLVLYAEHEFNASTFTSRVIAGTGSDVYSAIIGAIGALRGPKHGGANEVSLEIQQRYETPDEAEADIRKRVENKEVVIGFGHPVYTIADPRHQVIKRVAKQLSEEGGSLKMYHIADRLETVMWETKKMFPNLDWFSAVSYNMMGVPTEMFTPLFVIARVTGWAAHIIEQRQDNKIIRPSANYTGPEDRPFVSIDDRC

SEQ ID NO: 75353 - protein, 628 aa, Salmonella typhimurium
MSFSEFYQRSINEPEAFWAEQARRIDWRQPFTQTLDHSRPPFARWFCGGTTNLCHNAVDRWRDKQPEALALIAVSSETDEERTFTFSQLHDEVNIVAAMLLSLGVQRGDRVLVYMPMIAEAQITLLACARIGAIHSVVFGGFASHSVAARIDDARPALIVSADAGARGGKILPYKKLLDDAIAQAQHQPKHVLLVDRGLAKMAWVDGRDLDFATLRQQHLGASVPVAWLESNETSCILYTSGTTGKPKGVQRDVGGYAVALATSMDTIFGGKAGGVFFCASDIGWVVGHSYIVYAPLLAGMATIVYEGLPTYPDCGVWWKIVEKYQVNRMFSAPTAIRVLKKFPTAQIRNHDLSSLEALYLAGEPLDEPTASWVTETLGVPVIDNYWQTESGWPIMALARALDDRPSRLGSPGVPMYGYNVQLLNEVTGEPCGINEKGMLVIEGPLPPGCIQTIWGDDARFVKTYWSLFNRQVYATFDWGIRDAEGYYFILGRTDDVINIAGHRLGTREIEESISSYPNVAEVAVVGIKDALKGQVAVAFVIPKQSDTLADREAARDEENAIMALVDNQIGHFGRPAHVWFVSQLPKTRSGKMLRRTIQAICEGRDPGDLTTIDDPASLQQIRQAIEE

SEQ ID NO: 75354 - protein, 429 aa, Salmonella typhimurium
METTQTSTIASIDSRSAWRKTDTMWMLGLYGTAIGAGVLFLPINAGVGGMIPLIIMAILAFPMTFFAHRGLTRFVLSGKNPGEDITEVVEEHFGIGAGKLITLLYFFAIYPILLVYSVAITNTVESFLTHQLAINPPPRAILSLILIVGMMTIVRFGEQMIVKAMSILVFPFVAALMLLALYLIPQWNGAALETLSFDSAASTGNGLWMTLWLAIPVMVFSFNHSPIISSFAVAKREEYGEGAEKKCSKILAFAHIMMVLTVMFFVFSCVLSLTPADLAAAKEQNISILSYLANHFNAPIIAWMAPIIAMIAITKSFLGHYLGAREGFNGMVIKSLRGKGKSIEINKLNKITALFMLVTTWIVATLNPSILGMIETLGGPIIAMILFLMPMYAIQKVPAMRKYSGHISNVFVVIMGLIAISAIFYSLFS

SEQ ID NO: 75355 - protein, 455 aa, Salmonella typhimurium
MISVFDIFKIGIGPSSSHTVGPMKAGKQFTDDLIARHILTDVTRVVVDVYGSLSLTGKGHHTDIAIIMGLAGNLPDTVDIDAIPSFIQDVNTHGRLLLANGQHEVEFPVDKCMNFHADNLSLHENGMRITALAGDKVLYSQTYYSIGGGFIVDEEHFGLTNSEPVNVPYPYKTAADLQRHCQETGLSLSGLMMQNELALHSKEALEQHFARVWEVMRSGIERGITTEGVLPGKLRVPRRAAALRRMLVSQDKTTTDPMAVVDWINMFALAVNEENAAGGRVVTAPTNGACGIVPAVLAYYDKFIREVNANSLARYMLVASAIGSLYKMNASISGAEVGCQGEVGVACSMAAAGLAELLGGSPAQVCIAAEIAMEHNLGLTCDPVAGQVQVPCIERNAIASVKAVNAARMAVRRTSEPRVCLDKVIETMYETGKDMNAKYRETSRGGLAMKIVTCD

SEQ ID NO: 75356 - protein, 978 aa, Salmonella typhimurium
MHSWKKKLVVSQLALACTLAITSQANATTYDTWTYYDNPTTALDWNNMDAAGTVDGNYVNYSGFVYYNNANGDFDQTFNGDTVNGTISTYYLNHDYNDATSNELNISNSVIHGSITSMLPIGYYDRFDTLDHDGYSEYYRFNNGTDTVDGNWYDGDVFTLNIANSTIDDDYEAFYFTDSYKDGDVTKYTNETFDVSEGVAVNLDVESNINISNNSRVAGIALSQGNTYNNTYTTESHNWDNNINVFDSTVTSGSDYILDSAYTTDTGTFGTGHFGNSDEPSDYTGAGDVALSFTDDNGASDYAMKNNVYFSNSTLMGDVKFTSNWNANFDADGDDTNGDGVPDTNHGWADDGLNVDELNLTLDNGSKWVGQATYTVDTTSRMYDVETNSLTPGATLEDNAWNRIVGNEVFQSGVFNVTLNNGSEWDTVGDSTVDTLAVNNGSQVNVSNSDLTSDTIDLTNGSSLNIGEGGYVDTDHLTIDSYSTVGLTESTGWSTYSNLYANTITVTNGGVLDVNVGQFDTEVFSTDKLELTSGNTADHNGNVVSGVFNIHSSDYVLNADLVNDRTWDTTQANYGYGTIAMNSDGHLTINGNGDINNGDELDNSSVDNVVAATGNYKVRIDNATGAGSVADYKGNELIYVNDVNTDATFSAANKADLGAYTYQAKQEGNTVVLEQMELTDYANMALSIPSANTNIWNLEQDTVGTRLTNARHGLADNGGAWVSYFGGNFNGDNGTINYDQDVNGIMVGVDTKVDGNNAKWIVGAAAGFAKGDLSDRTGQVDQDSQSAYIYSSARFANNIFVDGNLSYSHFNNDLSANMSDGTYVDGNTSSDAWGFGLKLGYDLKLGDAGYVTPYGSVSGLFQSGDDYQLSNDMKVDGQSYDSMRYELGVDAGYTFTYSEDQALTPYFKLAYVYDDSNNDADVNGDSIDNGVEGSAVRVGLGTQFSFTKNFSAYTDANYLGGGDVDQDWSANVGVKYTW

SEQ ID NO: 75357 - protein, 207 aa, Salmonella typhimurium
MLSLSKPLQEFYRLDKCLSKHGTRFEFVNDKEIICSPDESNTHTFVILEGVVSLVRGDKVLIGIVQAPFIFGLADGVAKKEAQYKLIAESGCIGYRLSSSQTLAIIEQNQLWREAFCWIVWKSQVLELRDKQLIGNNSYDQIRATLMTMIEWDEELRSRIGVMNYIHQRTRVSRSVVAEVLAALRKGNYIEMNKGKLISINRLPSEY

SEQ ID NO: 75358 - protein, 287 aa, Salmonella typhimurium; identical to SEQ ID NO: 73182

SEQ ID NO: 75359 - protein, 140 aa, Salmonella typhimurium
MLKTISPLISPTLLKVLAEMGHGDEIIFSDAHFPAHSLGPQVIRADGLSVSDLLRAIIPLFELDSYAPPLVMMAAVEGDTLDPNVEARYRDALSLEAPCPDIVRIDRYAFYERAQKAFAIVITGECAKYGNILLKKGVTP

SEQ ID NO: 75360 - protein, 703 aa, Salmonella typhimurium
LYLFESLNQLIQTYLPEDQIKRLRQAYLVARDAHEGQTRSSGEPYITHPVAVACILAEMKLDYETLMAALLHDVIEDTPATYQDMEQLFGKSVAELVEGVSKLDKLKFRDKKEAQAENFRKMIMAMVQDIRVILIKLADRTHNMRTLGSLRPDKRRRIARETLEIYSPLAHRLGIHHIKTELEELGFEALYPNRYRVIKEVVKAARGNRKEMIQKILSEIEGRLQEAGIPCRVSGREKHLYSIYCKMVLKEQRFHSIMDIYAFRVIVHDSDTCYRVLGQMHSLYKPRPGRVKDYIAIPKANGYQSLHTSMIGPHGVPVEVQIRTEDMDQMAEMGVAAHWAYKEHGETSTTAQIRAQRWMQSLLELQQSAGSSFEFIESVKSDLFPDEIYVFTPEGRIVELPAGATPVDFAYAVHTDIGHACVGARVDRQPYPLSQPLSSGQTVEIITAPGARPNAAWLNFVVSSKARAKIRQLLKNLKRDDSVSLGRRLLNHALGGSRKLAEIPQENIQRELDRMKLATLDDLLAEIGLGNAMSVVVAKNLQQGEAVVPTVAQSNHGHLPIKGADGVLITFAKCCRPIPGDPIIAHVSPGKGLVIHHESCRNIRGYQKEPEKFMAVEWDKETEQEFITEIKVEMFNHQGALANLTAAINTTTSNIQSLNTEEKDGRVYSTFIRLTARDRVHLANIMRKIRVMPDVIKVTRNRN

SEQ ID NO: 75361 - protein, 403 aa, Salmonella typhimurium
MESWKVNLISVWFGCFFTGLAISQILPFLPLYISQLGVSSHEALSMWSGLTFSITFLISAIVSPMWGSLADRKGRKLMLLRASLGMAIAILLQAFATHVWQLFLLRGIMGLTSGYIPNAMALVASQVPRERSGWALSTLSTAQISGVIGGPLMGGFVADHIGLRAVFLITAMLLVVSFLVTLFLIKEGVRPVIKKSERLSGKAVFASLPYPALVISLFFTTMVIQLCNGSISPILALFIKSMMPDSNNIAFLSGLIASVPGISALISAPRLGKLGDRIGTERILMATLICAVLLFFAMSWVTTPFQLGLLRFLLGFADGAMLPAVQTLLVKYSSDQITGRIFGYNQSFMYLGNVVGPLMGATVSAMAGFRWVFIATAAIVLINIGQLTLALRRRRNAQKAKGQ

SEQ ID NO: 75362 - protein, 63 aa, Salmonella typhimurium
MPTRPPYPREAYIVTIEKGTPGQTVTWYQLRADHPKPDSLISEHPTAEEAMDAKNRYEDPDKS

SEQ ID NO: 75363 - protein, 277 aa, Salmonella typhimurium
MEKSLLVIVRHKPGRTRLLMRALQSINDQTFKKINIIIFCMEEELKCHNVDDFYLKELSNIYSVIYDESCIFNAIKMSESNYLCFMDDDDSWAPEYVSRLLSVLANIQSTYSSVNAIACHTNKVAEIAENNRIIINSTQPWNHYLNAGPVSFDVIYYRNSIPLSSCLFDKNSVIDMIESHKLSSPAFFWPFFIHYLAENDVWILPEALAFYHFRENDDFEFGNYTVINNELFDIECKIAENKMMRSIDDSSLLNVLLSNIANNSLFHKISYIENKIK

SEQ ID NO: 75364 - protein, 46 aa, Salmonella typhimurium; identical to SEQ ID NO: 72787

SEQ ID NO: 75365 - protein, 294 aa, Salmonella typhimurium
MLRKKQYNSKANVSYLIYQQANLMKYTITTIKYVNFLISDILDPLILNKLITMEPGLTMEEKKMKNRLKRDFSHISIEIPKSITQVIKEKIREMIIHGDFDLGQAISENELSNILMVSKTPIREAFIWLSYNENLVNIIPRSGTFVFSVTDEDINDLIKMRVILEQGAIREAMEKNANNVIVELSNILSKSAKINAERDTQAYLKLDHDFHYVFVKYADNKYISQAHLLISARLLAIRYRLDFTAEYITSSNRGHATILDMLKNNNVEGVCNFITHHIGSGFTERARKLLALKA

SEQ ID NO: 75366 - protein, 21 aa, Salmonella typhimurium
MNRISTTTITTITITTGNGAG

SEQ ID NO: 75367 - protein, 84 aa, Salmonella typhimurium
MREKRDLWNIKESYTSSAVIAKTYYLRQKPNETGRHLTISPYGWDLYITCQITLWSAVFLYWGYQHLISCWPLLSAHYLLRRRW

SEQ ID NO: 75368 - protein, 77 aa, Salmonella typhimurium
MRIELVISRAKQLPEGAVPALEKELITRLQNQYENCNLTIRRGSQDGLSIVGAADGDKKRIQSILQETWESADDWFY

SEQ ID NO: 75369 - protein, 46 aa, Salmonella typhimurium [sequence omitted]

SEQ ID NO: 75370 - protein, 119 aa, Salmonella typhimurium
VVKLAFPRELRLLTPAHFTFVFQQPQRAGTPQITILGRLNSLGHPRIGLTVAKKNVRRAHERNRIKRLTRESFRLRQHELPAMDFVVVAKKGVADLDNRALSEALEKLWRRHCRLARGS

SEQ ID NO: 75371 - protein, 176 aa, Salmonella typhimurium
LRLQDVCKALKTAAYAAINDHITRPDDNACHYRLIDFAIQLHFAQTFFHRGADFRKLLFTQCGCRRNFYLGGSFTGGTQMNKLLQNIRERVQTIIFSHHPNQVLTVFVLLTADCDKRLSERFRRQRAREKLCHLFVLGYLGGKRQHILPALYTLVFNGKVKSCFGVGASYRNKFRH

SEQ ID NO: 75372 - protein, 356 aa, Salmonella typhimurium
MLFTWIVKTCQRHLSRLTWPALLGLFIGQYLLCYLVLRLLRESALVSQLSDFIYYCSVVGSTLGFGDLSPQTAPGRLFTALWQIPVSVGLFGALMGKVIAQVQGMLAKGITGMGDYRHLHHHMLVIGWRGHQTEKMISLLLYDKRRAFERVLLCELEDIQHPLPGNNWVDFIRISNFNDPQEHQRMGLEQCQSVIIFARTDEQTFTAALSLADYVPAQCHIVVYLEDERYAGLLETHCPRMEIVRNLSAEQLSRSIQDPGSSQSVASIMNPMLGDTGFALPVPASVAPMRYGALMRYMKLHHDATVLGISHCKNGRGMELNPVISTEVRGGMWLHLVGNNRILAEEVAWQEIEVPL

SEQ ID NO: 75373 - protein, 559 aa, Salmonella typhimurium
MTQHTQTPSMPSPLWQYWRGLSGWNFYFLVKFGLLWAGYLNFHPLLNLVFMAFLLMPIPKYRLHRLRHWIAIPVGFALFWHDTWLPGPQSIMSQGTQVAEFSSGYLLDLIARFINWQMIGAIFVLLVAWLFLSQWIRVTVFVVAIMVWLNVLTLTGPVFTLWPAGQPTDTVTTTGGNAAATVATAGDKPVIGDMPAQTAPPTTANLNAWLNTFYAAEEKRKTTFPAQLPPDAQPFDLLVINICSLSWSDVEAAGLMSHPLWSHFDILFKHFNSGTSYSGPAAIRLLRASCGQPSHTRLYQPANNECYLFDNLAKLGFTQHLMMDHNGEFGGFLKEVRENGGMQSELMNQSGLPTALLSFDGSPVYDDLAVLNRWLTGEEREANSRSATFFNLLPLHDGNHFPGVSKTADYKIRAQKLFDELDAFFTELEKSGRKVMVVVVPEHGGALKGDRMQISGLRDIPSPSITNVPAGVKFFGMKAPHEGAPIDINQPSSYLAISELVVRAVDGKLFTEDSVNWNKLTSNLPQTAPVSENANAVVIQYQGKPYVRLNGGDWVPYPQ

SEQ ID NO: 75374 - protein, 293 aa, Salmonella typhimurium
MQQYIGIDVGGTHVKYGVINSDGEELTHHQFDTPEDASTFTRKWQDVVARCQQDYDIAAIGVSFPGHINPHNGHAAKAGALAYLDDVNLMELFSGLTDLPLVVENDANCAALGEMWRGAGQHYENMVCITIGTGIGGGIIVGRELYRGAHFHAGEFGVMPVGNNGESMHKIASTSGLMASCRQALALPAEEMPPADVIFERMATDVHLREAVNDWARYLSRGVYSVISMFDPGVVLIGGGISEQEKLYPLLTRHLETFEMWEALQVPIQPCQLGNQAGRLGAVWLAQQKLDRG

SEQ ID NO: 75375 - protein, 121 aa, Salmonella typhimurium; identical to SEQ ID NO: 73617

SEQ ID NO: 75376 - protein, 91 aa, Salmonella typhi; identical to SEQ ID NO: 43000

SEQ ID NO: 75377 - protein, 402 aa, Salmonella typhi; identical to SEQ ID NO: 59551

SEQ ID NO: 75378 - protein, 167 aa, Salmonella typhi; identical to SEQ ID NO: 56103

SEQ ID NO: 75379 - protein, 63 aa, Salmonella typhi
MPTRPPYPREAYIVTIEKGTPGQTVTWYQLRADHPKPDSLISEHPTAEEAMDAKKRYEDPDKS

SEQ ID NO: 75380 - protein, 398 aa, Salmonella typhi
MRGDFYKQLTNDLETARAEGLFKEERIITSAQQADITVADGSHVINFCANNYLGLANHPELINAAKAGMDSHGFGMASVRFICGTQDSHKALEQKLASFLGMEDAILYSSCFDANGGLFETLLGAEDAIISDALNHASIIDGVRLCKAKRYRYANNDMVELEARLKEAREAGARHVLIATDGVFSMDGVIANLKGVCDLADKYDALVMVDDSHAVGFVGENGRGSHEYCDVMGRVDIITGTLGKALGGASGGYTAARKEVVEWLRQRSRPYLFSNSLAPAIVAASIKVLEMVEAGAELRDRLWANARQFREQMSAAGFTLAGADHAIIPVMLGDAVVAQKFARELQKEGIYVTGFFYPVVPKGQARIRTQMSAAHTPEQITRAVDAFTRIGKQLGVIA

SEQ ID NO: 75381 - protein, 344 aa, Salmonella typhi
MKNSKTKVSIIIPLYNAGADFNACMASLIAQTWSALEIIIVNDGSTDHSIEIAKHYAEHYPHVRLLHQANAGASVARNLGLQAATGDYVAFVDADDLVYPKMYETLMTMALNDDLDVAQCNADWCVRKTGHAWQSIPTDRLRSTGVLSGPDWLRMALASRRWTHVVWMGVYRRALITDNNITFVPGLHHQDILWSTEVMFNATRVRYTEQSLYKYFLHDNSVSRLQRQGNKNLNYQRHYIKITRLLEKLNRDYARRIPIYPEFRQQITWEALRVCHAVRKEPDILTRQRMIAEIFTSGMYRRMMANVRSAKAAYQTLLWSFRLWQWRDKTLSHRRMARKALNLS

SEQ ID NO: 75382 - protein, 320 aa, Salmonella typhi
MPQFRRSILTLATLLAFAHPVFAGKLAIVIDDFGYRPHTENQVLALPPNISVAVLPNAPHAREMATKAHNSGHEVLIHLPMAPLSKQPLEKDTLRPDMSSDEIERIIREAVNNVPYAVGLNNHMGSAMTSSLFGMQKVMQALEHYNLYFLDSMTIGNSQAMRAASGTGVKVIKRKVFLDDTQNEADIRRQFNRTIELARRNGSAIAIGHPHPATVRVLQQMVYRLPADITLVRPGSLLNEPQVDTSRPDLTPQKIDAPRNPFRGVKMCKPKKPLQPVYATRFFSVIGESITQSSVIVWFQHQWQGWGKIAAPKNMSAKTD

SEQ ID NO: 75383 - protein, 143 aa, Salmonella typhi
MQEIMQFVGRHPILSIAWIALLVAVLFTTFKGLTSKVKVITRGEATRLINKEDAVVVDLRQRDDFRKGHIAGATNLLPSEIKANNVGELEKHKDKPIIVVDGSGMQCQESANALTKAGFEKVFVLKEGVAGWSGENLPLVRGK

SEQ ID NO: 75384 - protein, 83 aa, Salmonella typhi
MANIEIYTKATCPFCHRAKALLNSKGVSFQEIAIDGDAVKREEMIKRSGRTTVPQIFIDAQHIGGCDDLYALDARGGLDPLLR

SEQ ID NO: 75385 - protein, 1034 aa, Salmonella typhi
MKILSLRLKNLNSLKGEWKVDFTAEPFASNGLFAITGPTGAGKTTLLDAICLALYHETPRLNTVSQSQNDLMTRDTAECLAEVEFEVKGEAWRAFWSQNRARNRPDGNLQAPRVELARCSDGKIFADKVKDKLEMIATLTGLDYGRFTRSMLLSQGQFAAFLNAKAKERAELLEELTGTEIYGQISAQVFEKHKSARLELEKLQAQASGVALLADEQLQQLEASLQALTDEEKRLLADQQGQQQHLHWLTRKNELHTELHARQQALYAAQEAREKAQPQLAALTLAQPARQLRPHWERIQEQTRAVERVRQHSDEVNARLQSAYRLRQRIRACAHRQFTQLNATGQRLKTWLAEHDGIRVWRSELAGWRALLTQQSHDRAQLSQWQQQLLSDMRQRDALPPLTLDLTPQALAEARALHTRQRPLRHRLAALQGQILPKQKRQAQLQAAIARHHQEQTQYTQRLADKRLSYKTKAQELADVRTICEQEARIKDLESQRAHLQSGQPCPLCGSTTHPAIAAYQALELSANQTRRDALEKEVKTLAEEGAALRGQLDALTQQLQRDESEAQSLLQEEQALTEEWQTLCATLGVQLQPQEDLAGWLTAAEEHEQQLDQLSQRHALQTQIAAHTEQVARFTAQIAQRQASLTADLAQYTLSLPAPEDEASWLNERADEAKIWQQRQTEFADLQTQIDRLAPLLETLPQTDTADSDDDVPLDNWRQTHDECVSLQSQLQTLQEQTTQEQQRAAEAIAHFDAALKNSPFDSQATFLAALLDEETVTRLEKQQQTLESQLQQAKALSAQSAQALADHQQQPPAGLDPTCTAEQLAQRLAQLAQQLRENTTRQGEIRQQIKQDADNRQRQRALMAEMKQASQQVEDWGYLNALIGSKEGDKFRKFAQGLTLDNLVWLANHQLTRLHGRYLLQRKASDALELEVVDTWQADAVRDTRTLSGGESFLVSLALALSDLVSHKTRIDSLFLDEGFGTLDSETLDAALDALDALNASGKTIGVISHVEAMKERIPVQIKVKKNQWAWL

SEQ ID NO: 75386 - protein, 400 aa, Salmonella typhi
MRILHTSDWHLGQNFYSKSRAAEHQAFLDWLLETAQAHQVDAIIVAGDIFDTDSPPSYARELYNRFVVNLQQTGCHLVVLAGNHDSVATLNESRDILAFLNTTVIASAGYAPRLLHRRDGSPGAVLCPIPFLRPRDIITSQAGLSGSEKQQQLLHAIADYYQQQYQEACLLRGERKLPVIATGHLTTVGASKSDAVRDIYIGTLDAFPAQHFPPADYIALGHIHRAQCVGGTEHIRYCGSPIALSFDECGKSKCVHLVTFDQGKWQSTESLAVPVTQLLAVLKGDLASITEQLEQWRGVEQSPPVWLDIEITTDDYLHDIQRRIQALTESLPVEVLLVRRSREQRERSLANERRETLSELSVEEVFARRLALEALDTPQRERLNQLFSSTLYALNEEHEA

SEQ ID NO: 75387 - protein, 431 aa, Salmonella typhi
MLERLSWKRLVLELVLCCIPALILSAFFGYLPWFLLAAVTGLLVWHFWNLLRLSWWLWVDRSMTPPPGRGSWEPLLYGLHQMQLRNKKRRRELGNLIKRFRSGAESLPDAVVLTTEEGGIFWCNGLAQQILGLRWPDDNGQNILNLLRYPEFTQYLKTRDFTRPLHLVLNTGRHLEIRVMPYTDKQLLMVARDVTQMHQLEGARRNFFANVSHELRTPLTVLQGYLEMMQEQALEGATREKALHTMREQTYRMEGLVKQLLTLSKIEVAPALLLNEKVDVPMMLRVVEREAQTLSQQKHTFTFAVDDSLSVLGNEEQLRSAISNLVYNAVNHTPAGTHITVSWRRAAHGAEFCIQDNGPGIAAEHIPRLTERFYRVDKARSRQTGGSGLGLAIVKHALNHHESRLEIDSSPGKGTRFSFVLPERLIAKNSD

SEQ ID NO: 75388 - protein, 439 aa, Salmonella typhi; identical to SEQ ID NO: 74835

SEQ ID NO: 75389 - protein, 339 aa, Salmonella typhi
MNQSNASMTVIGAGSYGTALAITLARNGHQVVLWGHDPKHIATLEHDRCNVAFLPDVPFPDTLHLESDLATALAASRNILVVVPSHVFSDVLRQIKPLMRPDARLVWATKGLEAETGRLLQDVAREALGDQIPLAVISGPTFAKELAAGLPTAISLASTDETFADDLQQLLHCGKSFRVYINADFIGVQLGGAVKNVIAIGAGMSDGIGFGANARTALITRGLTEMSRLGAALGADPATFMGMAGLGDLVLTCTDNQSRNRRFGMMLGQGMDVKGAQDKIGQVVEGYRNTKEVRELAHRFGVEMPITEEIYQVLYCGKNAREAALTLLGRARKEELSRH

SEQ ID NO: 75390 - protein, 273 aa, Salmonella typhi
MPCEELEIVWKNIKAEARALADCEPMLASFYHATLLKHENLGSALSYMLANKLASPIMPAIAIREVVEEAYAADPEMIASAACDIQAVRTRDPAVDKYSTPLLYLKGFHALQAYRIGHWLWNKGRRALAIFLQNQVSVSFQVDIHPAAKIGRGIMLDHATGIVVGETAVIEDDVSILQSVTLGGTGKTSGDRHPKIREGVMIGAGAKILGNIEVGRGAKIGAGSVVLQPVPPHTTAAGVPARIVGKPGSDKPSMDMDQHFNGLHHTFEYGDGI

SEQ ID NO: 75391 - protein, 820 aa, Salmonella typhi
MRVLKFGGTSVANAERFLRVADILESNSRQGQVATVLSAPAKITNHLVAMIEKTIGGQDALPNISDAERIFSDLLAGLASAQPGFPLARLKMVVEQEFAQIKHVLHGISLLGQCPDSINAALICRGEKMSIAIMAGLLEARGHRVTVIDPVEKLLAVGHYLESTVDIAESTRRIAASQIPADHMILMAGFTAGNEKGELVVLGRNGSDYSAAVLAACLRADCCEIWTDVDGVYTCDPRQVPDARLLKSMSYQEAMELSYFGAKVLHPRTITPIAQFQIPCLIKNTGNPQAPGTLIGASSDDDNLPVKGISNLNNMAMFSVSGPGMKGMIGMAARVFAAMSRAGISVVLITQSSSEYSISFCVPQSDCARARRAMQDEFYLELKEGLLEPLAVTERLAIISVVGDGMRTLRGISAKFFAALARANINIVAIAQGSSERSISVVVNNDDATTGVRVTHQMLFNTDQVIEVFVIGVGGVGGALLEQLKRQQTWLKNKHIDLRVCGVANSKALLTNVHGLNLDNWQAELAQANAPFNLGRLIRLVKEYHLLNPVIVDCTSSQAVADQYADFLREGFHVVTPNKKANTSSMDYYHQLRFAAAQSRRKFLYDTNVGAGLPVIENLQNLLNAGDELQKFSGILSGSLSFIFGKLEEGMSLSQATALAREMGYTEPDPRDDLSGMDVARKLLILARETGRELELSDIVIEPVLPDEFDASGDVTAFMAHLPQLDDAFAARVAKARDEGKVLRYVGNIEEDGVCRVKIAEVDGNDPLFKVKNGENALAFYSHYYQPLPLVLRGYGAGNDVTAAGVFADLLRTLSWKLGV

SEQ ID NO: 75392 - protein, 309 aa, Salmonella typhi; identical to SEQ ID NO: 74839

SEQ ID NO: 75393 - protein, 428 aa, Salmonella typhi
MKLYNLKDHNEQVSFAQAVTQGLGKQQGLFFPHDLPEFSLTEIDEMLNQDFVSRSAKILSAFIGDEIPQQILEERVRAAFAFPAPVAQVESDVGCLELFHGPTLAFKDFGGRFMAQMLTHISGDKPVTILTATSGDTGAAVAHAFYGLENVRVVILYPRGKISPLQEKLFCTLGGNIETVAIDGDFDACQALVKQAFDDEELKTALGLNSANSINISRLLAQICYYFEAVAQLPQGARNQLVISVPSGNFGDLTAGLLAKSLGLPVKRFIAATNINDTVPRFLHDGKWAPKATQATLSNAMDVSQPNNWPRVEELFRRKIWRLTELGYAAVDDTTTQQTMRELKAKGYISEPHAAVAYRALRDQLNPGEYGLFLGTAHPAKFKESVESILGETLALPEALAERADLPLLSHHLPADFAALRKLMMTRQ

SEQ ID NO: 75394 - protein, 157 aa, Salmonella typhi
MLNIVLFEPEIPPNTGNIIRLCANTGFRLHIIEPMGFAWDDKRLRRAGLDYHEFAAVQRHHDYAAFVAAENPQRLFALTTKGTPAHSAVSYQDGDYLMFGPETRGLPASILDALPKEQKIRIPMMPDSRSMNLSNAVSVVVYEAWRQLGYPGAVLRS

SEQ ID NO: 75395 - protein, 396 aa, Salmonella typhi
MIISATSDYRAAAQRTLPPFLFHYIDGGAYAEYTLRRNVEDLSQVALRQRVLKNMSDLSLETTLFNETLSMPVALAPVGLCGMYARRGEVQAAAAADAKGIPFTLSTVSVCPIEEVAPTLKRPMWFQLYVLRDRGFMRNALERAKAAGCSTLVFTVDMPTPGARYRDAHSGMSGPNAAMRRYWQAVMHPKWAWDVGLNGRPHDLGNISAYLGKPTGLEDYIGWLANNFDPSISWKDLEWIREFWDGPMVIKGILDPEDARDAVRFGADGIVVSNHGGRQLDGVLSSARALPAIADAVKGDIAILADSGIRNGLDVVRMIALGADTVLLGRAYLYALATAGKTGVANLLDLIEKEMKVAMTLTGAKSISEISGDSLVQELGKSLPAALAPMSKGDAA

SEQ ID NO: 75396 - protein, 317 aa, Salmonella typhi; identical to SEQ ID NO: 74843

SEQ ID NO: 75397 - protein, 196 aa, Salmonella typhi
MNTLRIGLVSISDRASSGVYQDKGIPALEEWLASALTTPFELQTRLIPDEQAIIEQTLCELVDEMSCHLVLTTGGTGPARRDVTPDATLAIADREMPGFGEQMRQISLRFVPTAILSRQVGVIRKQALILNLPGQPKSIKETLEGVKADDGSVSVPGIFASVPYCIQLLDGPYVETAPEVVAAFRPKSARRENMSS

SEQ ID NO: 75398 - protein, 1107 aa, Salmonella typhi
MPLREHLLSPARRQKAAEKKSGRRKLAVSALVGLSSIMVSADALANAGNDTGSINQNTTDIATNTTSINNLSNSVTTLTDDALLWDAASGTFSASRNGSASKITNLAAGTLAADSTDAVNGSQLFDTNEKVDQNTADITTNTNSINQNTTDIATNTTSINNLSNSVTTLTDDALLWDAASGTFSASRNGSASKITNLAAGTLAADSTDAVNGSQLFDTNEKVDQNTADITTNTNSINQNTTDIATNTTSINNLSNSVTTLTDDALLWDADSGTFSASRNGSASKITNLAAGTLAADSTDAVNGSQLYETNQKVDQNTSAIADINTSITNLSSDNLSWNETTNSFSASHGSSTTNKITNVAAGELSEESTDAVNGSQLFETNEKVDQNTTDIAANTTNITQNSTAIENLNTSVSDINTSITGLTDNALLWDEDTGAFSANHGGSTSKITNVAAGALSEDSTDAVNGSQLYETNQKVDQNTSAIADINTSITNLGTDALSWDDEEGAFSASHGTSGTNKITNVAAGEIASDSTDAINGSQLYETNMLISQYNESISQLAGDTSETYITENGTGVKYIRTNDNGLEGQDAYATGNGATAVGYDAVASGAGCLALGQNSSSSIEGSIALGSGSTSNRAITTGIRETSATSDGVVIGYNTTDRELLGALSLGTDGESYRQITNVADGSEAQDAVTVRQLQNAIGAVTTTPTKYYHANSTEEDSLAVGTDSLAMGAKTIVNADAGIGIGLNTLVMADAINGIAIGSNARANHANSIAMGNGSQTTRGAQTDYTAYNMDTPQNSVGEFSVGSEDGQRQITNVAAGSADTDAVNVGQLKVTDAQVSRNTQSITNLNTQVSNLDTRVTNIENGIGDIVTTGSTKYFKTNTDGADANAQGADSVAIGSGSIAAAENSVALGTNSVADEANTVSVGSSTQQRRITNVAAGVNNTDAVNVAQLKASEAGSVRYETNADGSVNYSVLNLGDGSGGTTRIGNVSAAVNDTDAVNYAQLKRSVEEANTYTDQKMGEMNSKIKGIENKMSGGIASAMAMAGLPQAYAPGANMTSIAGGTFNGESAVAIGVSMVSESGGWVYKLQGTSNSQGDYSAAIGAGFQW

SEQ ID NO: 75399 - protein, 638 aa, Salmonella typhi
MGKIIGIDLGTTNSCVAIMDGTQARVLENAEGDRTTPSIIAYTQDGETLVGQPAKRQAVTNPQNTLFAIKRLIGRRFQDEEVQRDVSIMPYKIIGADNGDAWLDVKGQKMAPPQISAEVLKKMKKTAEDYLGEPVTEAVITVPAYFNDAQRQATKDAGRIAGLEVKRIINEPTAAALAYGLDKEVGNRTIAVYDLGGGTFDISIIEIDEVDGEKTFEVLATNGDTHLGGEDFDTRLINYLVDEFKKDQGIDLRNDPLAMQRLKEAAEKAKIELSSAQQTDVNLPYITADATGPKHMNIKVTRAKLESLVEDLVNRSIEPLKVALQDAGLSVSDINDVILVGGQTRMPMVQKKVAEFFGKEPRKDVNPDEAVAIGAAVQGGVLTGDVKDVLLLDVTPLSLGIETMGGVMTPLITKNTTIPTKHSQVFSTAEDNQSAVTIHVLQGERKRASDNKSLGQFNLDGINPAPRGMPQIEVTFDIDADGILHVSAKDKNSGKEQKITIKASSGLNEEEIQKMVRDAEANAESDRKFEELVQTRNQGDHLLHSTRKQVEEAGDKLPADDKTAIESALSALETALKGEDKAAIEAKMQELAQVSQKLMEIAQQQHAQQQAGSADASANNAKDDDVVDAEFEEVKDKK

SEQ ID NO: 75400 - protein, 456 aa, Salmonella typhi
MESNNKLKRGLSTRHIRFMALGSAIGTGLFYGSADAIKMAGPSVLLAYIIGGVAAYIIMRALGEMSVHNPAASSFSRYAQENLGPLAGYITGWTYCFEILIVAIADVTAFGIYMGVWFPAVPHWIWVLSVVLIICAINLMSVKMFGELEFWFSFFKVATIIIMIVAGIGIIVWGIGNGGQPTGIHNLWSNGGFFSNGWLGMIMSLQMVMFAYGGIEIIGITAGEAKDPEKSIPRAINSVPMRILVFYVGTLFVIMSIYPWNQVGTNGSPFVLTFQHMGITFAASILNFVVLTASLSAINSDVFGVGRMLHGMAEQGSAPKVFAKTSRRGIPWVTVLVMTIALLFAVYLNYIMPENVFLVIASLVTFATVWVWIMILLSQIAFRRRLPPEEVKALKFKVPGGVVTTIAGLIFLVFIIALIGYHPNTRISLYVGFAWIVLLLIGWIFKRRRDRQLAQA

SEQ ID NO: 75401 - protein, 605 aa, Salmonella typhi
MLNAWHLPVAPFVKQHNDKLTITLWLSGENPPSRVTLRSEFDNEEISLAMRKQRRQPQPGVTAWRATLNIALGQPRRRYSFKLLWHDRQRWFTPQGFSCFPPARLEQFAVDVPDSGPQWVADQIFYQIFPDRFARSATREADQDRVYYHHAAGQEIVLRDWDDPLTPQAGGSTFYGGCLNGICEKLPYLKKLGVTALYLNPVFTAPSVHKYDTEDYRHVDPQFGGDRALLRLRRETQAQGMRLVLDGVFNHSGDSHAWFDRHNRSTGGACHHPDSPWRDWYSFSPQGVALDWLGYPSLPKLDYQSETLVDEIYRGEDSIVRHWLKAPWNMDGWRLDVVHMLGEAGGARHNLQHVAGITRAAKEAQPEAYIVGEHFSDARQWLQADAEDAAMNYRGFTFPLWGFLANTDIAYEPQHIDARTCIAWMDNYRAGLSHQQQLRMFNQLDSHDTARFKTLLGKDAARLPLAVVWLFTWPGVPCIYYGDEVGVDGANDPMCRKPFPWDERKQDGNLLALYQRMAKLRQSSLALRRGGCQALYAEGDVVVFVRVYQQQRALVAINRGEACEVALEALPLLNVAGWQCKTGSGDIREGRLSLPAISATVWMNR

SEQ ID NO: 75402 - protein, 354 aa, Salmonella typhi
MRVTDFSFELPESLIAHYPQPERSRCRLLSLEGPTGALTHGTFTDLLDKLNPGDLLVFNNTRVIPARLFGRKASGGKIEVLVERMLDDKRILAHIRASKAPKPGTELLLGDDESIHATMTARHGALFEVEFNDPRPVLDILNAIGHMPLPPYIDRPDEDADRELYQTVYSEKPGAVAAPTAGLHFDEPLLAALREKGVEMAFVTLHVGAGTFQPVRVDTIEDHIMHSEYAEVPQEVVDAVLAAKARGNRVIAVGTTSVRSLESAAQAAKSDLIEPFFGDTQIFIYPGYQYKVIDALITNFHLPESTLIMLVSAFAGYQHTMNAYKTAVEQKYRFFSYGDAMFITCNPQAISERP

SEQ ID NO: 75403 - protein, 375 aa, Salmonella typhi
MKFELDTTDGRARRGRLVFDRGVVETPAFMPVGTYGTVKGMTPEEVEATGAQIILGNTFHLWLRPGQEIMKLHGDLHDFMQWKGPILTDSGGFQVFSLGDIRKITEQGVHFRNPINGDPIFLDPEKSMEIQYDLGSDIVMIFDECTPYPADWDYAKRSMEMSLRWAKRSRDRFDSLGNKNALFGIIQGSVYEDLRDISVKGLVEIGFDGYAVGGLAVGEPKADMHRILEHVCPQIPADKPRYLMGVGKPEDLVEGVRRGIDMFDCVMPTRNARNGHLFVTDGVVKIRNAKHKSDISPLDAECDCYTCRNYSRAYLHHLDRCNEILGARLNTIHNLRYYQRLMAGLRKAIEEGKLESFVTEFYQRQGRPVPPLNVD

SEQ ID NO: 75404 - protein, 490 aa, Salmonella typhi; identical to SEQ ID NO: 74932

SEQ ID NO: 75405 - protein, 196 aa, Salmonella typhi; identical to SEQ ID NO: 75338

SEQ ID NO: 75406 - protein, 618 aa, Salmonella typhi
MSKGTTSQDAPFGTLLGYAPGGVAIYSSDYNSLDPWDDDDAAFRSYIDDEYMGHKWQCVEFARRFLFLNYGVVFTDVGMAWEIFSLRFLREVVNDNILPLQAFPNGSPRAPEAGALLIWQKGGEFNETGHVAIITQLLDNKIRIAEQNVIHTPLPPGQQWTRELEMVVENGCYTLRDTFDDTTILGWMIQTDDTQYSLSQPDIANQSLAIRGARLPEKGQFDGQWLDERDPLQKAYVQANGHVINQDPYQYFTITESAEQELIKATNELHLMYLHATDKVLKDDNLLALFDIPKILWPRLRLSWQRRRHHMITGRMDFCMDERGLKVYEYNADSASCHTEAGLILEKWAEQGYTGKGHNPAEGLINELAGAWKHSKARPFVHIMQDDDIEEDYHAQFMQQALHQAGFASKILRGLGELRWDDAGQLIDGDGRLVNCVWKTWAWETAMEQIREVSETEYAAVPIRTGHPENEVRLIDVLLRPEVLVFEPLWTVIPGNKAILPILWSLFPHHRYLLDTDFTVNDELVQTGYAVKPIAGRCGSNIDLVSHQEELLDKTSGKFATQKNIYQQLWCLPKVAGKYIQVCTFTVGGNYGGTCLRGDDSLVIKKESDIEPLIVIKA

SEQ ID NO: 75407 - protein, 382 aa, Salmonella typhi
MKALHFGAGNIGRGFIGKLLADAGIQLTFADVNQVVLDALNARHSYQVHVVGENEQVDTVSGVNAVSSIGDDVVDLIAHVDLITTAVGPVVLERIAPAIAKGLVKRKAQGVDAPLNIIACENMVRGTTQLKGHVMNALADGDKAWVEQHVGFVDSAVDRIVPPSASATNDPLEVTVETFSEWIVDKTQFKGALPNIPGMELTDNLMAFVERKLFTLNTGHAITAYLGKLAGHQTIRDAILDEGIRAVVKGAMEESGAVLIKRYGFDADKHAAYIQKILGRFENPYLKDDVERVGRQPLRKLSAGDRLIKPLLGTLEYGLPHVNLVKGIAAAMHFRSDEDPQAQELAALITEKGPQAALAQISGLDANSDVVAEAVNAYNATK

SEQ ID NO: 75408 - protein, 202 aa, Salmonella typhi
MKLIGSYTSPFVRKISVLLLEKGITFEFINELPYEADNGVAQYNPLGKVPALVTEKGEYWFDSPIIAEYIELLDIAPAMLPRDPMAALKVRQLEALADGIMDAALVSVREQARPAAQQSETELLRQREKINRSLDMLESYLSDGTLKTDTVNLATIAIACAVGYLNFRRVAPGWCVSRPHLVKLVETLFQRESFARTEAPKA

SEQ ID NO: 75409 - protein, 512 aa, Salmonella typhi
MTNNPPSTRIQPSEYGYPLKLKARYDNFIGGDWVAPADGEYYQNLTPVTGQPLCEVASSGKKDIDLALDAAHKAKDKWAHTSVQDRAAILFKIADRMEQNLELLATAETWDNGKPIRETSAADIPLAIDHFRYFASCIRAQEGGISEVDSETVAYHFHEPLGVVGQIIPWNFPLLMASWKMAPALAAGNCVVLKPARLTPLSVLLLMEVIGDLLPPGVVNVVNGAGGEIGEYLATSKRIAKVAFTGSTEVGQQIMQYATQNIIPVTLELGGKSPNIFFADVMDEEDAFFDKALEGFALFAFNQGEVCTCPSRALVQESIYERFMERAIRRVESIRSGNPLDSGTQMGAQVSHGQLETILNYIDIGKKEGADILTGGRRKELDGELKEGYYLEPTILFGKNNMRVFQEEIFGPVLAVTTFKTMEKALEIANDTQYGLGAGVWSRNGNLAYKMGRGIQAGRVWTNCYHAYPAHAAFGGYKQSGIGRETHKMMLEHYQQTKCLLVSYSDKPLGLF

SEQ ID NO: 75410 - protein, 115 aa, Salmonella typhi; identical to SEQ ID NO: 73354

SEQ ID NO: 75411 - protein, 179 aa, Salmonella typhi
MTRRYLRILLVGSLLSLTACAPQSEVRQMHQSISTLNKEMTQLNQETVKITQQNKLNADSTRGVYLLPGANTPARLESQIGTLRMTLLEITPVADGAHATLRIQGKSRDPLPAFSATVEYGQIQGTTENYQEVNAQSLLVNAPASLLAPSDVNIPLPLKGITPAQLGFIRIHDIQPVNQ

SEQ ID NO: 75412 - protein, 367 aa, Salmonella typhi
MQDEFYMARALKLAQRGRFTTHPNPNVGCVIVNNGDIVGEGYHHRAGEPHAEVHALRMAGAKAKGATAYVTLEPCSHHGRTPPCCDALIAAGVARVVAAMQDPNPQVAGRGLYRLQQAGIAVSHGLMMSEAEALNKGFLKRMRTGFPYLQLKLGASVDGRTAMASGESQWITSPQARRDVQRLRAQSHAILTSSATVLADDPALTVRWAELDASTQASYPQENLRQPVRIVIDSQNRVTPAHRIVQQPGETWIARTQEDSHAWPDSVRTISVPAHNGHLDLVVLMMQLGRQQINSIWVEAGPGLAGALLQAGLVDELIVYVAPKLLGTQARGLCELPGLEKLADAPQFTFSEIRHVGPDVCLHMVSA

SEQ ID NO: 75413 - protein, 156 aa, Salmonella typhi; identical to SEQ ID NO: 74855

SEQ ID NO: 75414 - protein, 139 aa, Salmonella typhi
MKPAARHRARECAVQALYSWQLSQNDIADVEYQFLAEQDVKDVDVLYFRELLSGVATNSAYLDGLMKPYLSRLLEELGQVEKAVLRIALFELSKRSDVPYKVAINEAIELAKTFGAEDSHKFVNGVLDKAAPVIRPNKK

SEQ ID NO: 75415 - protein, 567 aa, Salmonella typhi
MSQRITIDPVTRIEGHLRIDCEIENGVVSKAWASGTMWRGMEEIVKNRDPRDAWMIVQRICGVCTTTHAISSVRAAESALNIDVPVNAQYIRNIILAAHTTHDHIVHFYQLSALDWVDITSALKADPEKASAMLDGVSSWHLNSAQEFTKVQNKIKDLVASGQLGIFANGYWGHPAMQLPPEVNLIAVAHYLQALECQRDANRVVALLGGKSPHIQNLAVGGVANPINLDSIGTLNLERLMYIKSFIDKLSDFVEQVYKVDTAVIAAYYPEWLERGKGAVNYLSAPEFPTDGKNGSFLFPGGYITNADLSTYRPITSHSDEFLIKGIQESAKHAWYKDEAPQAPWEGTTIPAYDGWSDDGKYSWVKSPTFYGKTVEVGPLANMLCKLAAGRESTQTKLNEIIALYQKLTGKTLEMAQLHSTLGRIIGRTVHCCELQNVLQDQYNALIVNIGKGDYTTFVKPNIQATGEFKGVGFLEAPRGMLSHWMVIKDGIISNYQAVVPSTWNSGPRNFNDDVGPYEQSLVGTPIADPAKPLEVVRTIHSFDPCMACAVHVVDADGNEVVSVKVL

SEQ ID NO: 75416 - protein, 392 aa, Salmonella typhi
MSHDPKPLGGKIISKPVIIFGPLIVLCMLLIVKRLVFGLGSVSDLNGGFPWGVWIAFDLLIGTGFACGGWALAWAVYVFNRGQYHPLVRPALLASLFGYSLGGLSITIDVGRYWNLPYFYIPGHFNVNSVLFETAVCMTIYIGVMALEFAPALFERLGWKVSLKRLNKVMFFIIALGALLPTMHQSSMGSLMISAGYKVHPLWQSYEMLPLFSVLTAFIMGFSIVIFEGALVQAGLKGNGPDEKNLFVKLTNTISVLLAIFVVLRFGELIYRDKLSYAFAGDFYSAMFWIEVVLMVFPLVVLRVAKLRNDSRMLYLSALSALLGCATWRLTYSLVAFNPGGGYHYFPTWEELLISIGFVAIEICAYIVLIRLLPILPPLKQNDHNRHEASKA

SEQ ID NO: 75417 - protein, 294 aa, Salmonella typhi
MSHLYDPTTQYYTGEYPKQKQPAPGVQAKMTPVPDCGEKSYVGSGRLKDRKALVTGGDSGIGRAAAIAYAREGTDVAINYLPAEEEDAQQVKALIEECGRKAVLLPGDLSDESFARSLVHKAREALGGLDILALVAGKQTAIPEIKDLTSEQFQQTFAVNVFALFWITQEAIPLLPKGASIITTSSIQAYQPSPHLLDYAATKAAILNYSRGLAKQVAEKGIRVNIVAPGPIWTALQISGGQTQDKIPQFGQQTPMKRAGQPAELAPVYVYLASQESSYVTAEVHGVCGGEHLG

SEQ ID NO: 75418 - protein, 325 aa, Salmonella typhi
MACGEFSLIARYFDRVRSSRLDVETGIGDDCALLNIPEKQTLAISTDTLVAGNHFLPDIDPADLAYKALAVNLSDLAAMGADPAWLTLALTLPEVDEPWLEAFSDSLFALLNYYDMQLIGGDTTRGPLSMTLGIHGYIPAGRALKRSGAKPGDWIYVTGTPGDSAAGLAVLQNRLQVSEETDAHYLIQRHLRPTPRILHGQALRDIASAAIDLSDGLISDLGHIVKASGCGARVDVDALPKSDAMMRHVDDGQELRWALSGGEDYELCFTVPELNRGALDVAIGQLGVPFTCIGQMSADIEGLNFVRDGMPVTFDWKGYDHFATP

SEQ ID NO: 75419 - protein, 620 aa, Salmonella typhi
MSFDIAKYPTLALVDSTQELRLLPKESLPKLCDELRRYLLDSVSRSSGHFASGLGTVELTVALHYVYNTPFDQLIWDVGHQAYPHKILTGRRDKIGTIRQKGGLHPFPWRGESEYDVLSVGHSSTSISAGIGIAVAAEKEGKDRRTVCVIGDGAITAGMAFEAMNHAGDIRPDMLVILNDNEMSISENVGALNNHLARLLSGKLYSSLREGGKKVFSGVPPIKELLKRTEEHIKGMVVPGTLFEELGFNYIGPVDGHDVMGLISTLKNMRDLKGPQFLHIMTKKGRGYEPAEKDPITFHAVPKFDPSSGCLPKSSGGLPGYSKIFGDWLCETAAKDSKLMAITPAMREGSGMVEFSRKFPDRYFDVAIAEQHAVTFAAGLAIGGYKPVVAIYSTFLQRAYDQVIHDVAIQKLPVMFAIDRAGIVGADGQTHQGAFDLSYLRCIPDMVIMTPSDENECRQMLFTGYHYNDGPTAVRYPRGNAQGVALTPLEKLPIGKGLVKRHGEKLAILNFGTLMPEAAKVAEALNATLVDMRFVKPLDDTLILEMAAQHDALVTLEENAIMGGAGSGVNEVLMAHRKPVPVLNIGLPDFFIPQGTQEEARAELGLDAAGIEAKIKAWLA

SEQ ID NO: 75420 - protein, 299 aa, Salmonella typhi
MDFTQQLQACVTQANQALSRFIAPLPFQNTPVVEAMQYGALLGGKRLRPFLVYATGQMFGVSTATLDAPAAAVECIHAYSLIHDDLPAMDDDDLRRGLPTCHIKFGEANAILAGDALQTLAFTIISDAPMPEVADRDRIAMIAELANASGIAGMCGGQALDLAAEGQRITLDALERIHRHKTGALIRAAVRLGALSAGDKGRNTLPILDRYAESIGLAFQVQDDILDVVGDTATLGKRQGADQQLGKSTYPALLGLEQARNKARDLIEDARQSLHQLAAQSLDTSALEALANYIIQRDK

SEQ ID NO: 75421 - protein, 723 aa, Salmonella typhi
MSAISLIQPDRDLFSWPQYWAACFGPAPFLPMSREEMDQLGWDSCDIILVTGDAYVDHPSFGMAICGRMLEAQGFRVGIIAQPDWNSKDDFMRLGKPNLFFGVTAGNMDSMINRYTADRKLRHDDAYTPDNVAGKRPDRATLVYTQRCKEAWKDVPVILGGIEASLRRTAHYDYWSDTVRRSVLVDSKADMLMFGNGERPLVGVAHRLAMGETIDQIRDVRNTAIMVKEALPGWSGVDSTRLDTPGKIDPIPHPYGEDLPCADNKPVAPKKQEAKAITVQPPRPKPWEKTYILLPSFEKVKGDKVLYAHASRILHHETNPGCARALMQKHGDRYVWINPPAIPLSTEEMDSVFALPYQRVPHPAYGNARIPAYEMIRFSINIMRGCFGGCSFCSITEHEGRIIQSRSEDSIINEIEAIRDTVPGFTGVISDLGGPTANMYMLRCKSPRAEQTCRRLSCVYPDICPHMDTDHTPTINLYRRARELKGIKKILIASGVRYDIAVEDPRYIKELASHHVGGYLKIAPEHTEEGPLSKMMKPGMGSYDRFKELFDLYSKQAGKEQYLIPYFISAHPGTRDEDMVNLALWLKRHRFRLDQVQNFYPSPLANSTTMYYTGKNPLGKIGYKSEDVVVPKGDRQRRLHKALLRYHDPANWPLIRQALEAMGKKHLIGGRRECLVPAPTIEEMREARRQNRNTRPALTKHTPVEHQRQGLAANKKRGKGAGR

SEQ ID NO: 75422 - protein, 245 aa, Salmonella typhi
MLYIFRLIVTVIYSILVCVFGSIYCLFSPRNPKHVATFGHMFGRLAPLFGLKVECRKPADAENYGNAIYIANHQNNYDMVTAANIVQPPTVTVGKKSLLWIPFFGQLYWLTGNLLIDRNNRAKAHSTIAAVVNHFKKRRISIWMFPEGTRSRGRGLLPFKTGAFHAAIAAGVPIIPVCVSNTSNKVNLNRLNNGLVIVEMLPPVDVSEYGKDQVRELAAHCRALMEQKIAELDKEVAEREATGKV

SEQ ID NO: 75423 - protein, 164 aa, Salmonella typhi
MKMFVPAVVFAALASASAWANNGDTAQPLEKIAPYPQAEKGMKRQVITLTPQQDESTLKVELLIGQTLNVDCNQHRLGGTLETKTLEGWGYDYYVFDNVTSPVSTMMACPEGKKEQKFVTAWLGEDGMLRYNSKLPIVVYTPANVDVKYRIWKADANVQNAIAR

SEQ ID NO: 75424 - protein, 889 aa, Salmonella typhi
MSQSDTTVSTRFSLLPGSITRFFLLLIIVLLVTMGVMVQSAVNAWLKDKSYQIVDITHAIHKRVDTWRYVTWQIYDNIAATTTPSTGEGLQETRLKQDVYYLEKPRRKTEALIFGSHDSATLEMTQRMSTYLDTLWGAENVPWSMYYLNGQDNSLILISTLPLKDLSSGFKESTIGNIVDSRRAEMLQQANALDERESFSSLRKLAWQNGHYFTLRTTFNQPGHLATVVAFDLPINDLIPPGMPLDSFRIEPDATQTTGRSSEKEAPDSVTISFNGSKIEISSALNSTGMRLIWQVPFGTLLLDTLQNILLPLLLNIGLLALALFGYATFRHQPGRSTESTSGNAANNELRVLRAINEEIVSLLPLGLLVYDQEGNRTVISNKIADHLLPHLNLQNITSMAEQHQGVIQATINNELYEIRLFRSQIAPRTQIFIIRDQDREVLVNKKLKQAQRLYEKNQQGRAAFMQNISNTLKEPVRQLAVNAAAVTTPESLKLADQADVLVRMIDEIQLANMLENDAWKSEATLFSLQDLIDEVVPEVLPAIKRKGLQLLINNHLSGNDERWGDRDALRRILLLLIQYAVTTTAMGKITLEVEQDESIAERLTFRILDTGEGVTLNEIDNLHFPYMNETQGDRYGKANPLTFWLCNQLARKLGGHLNIKARETLGTRYTVHVKMLPHDQHTQVEERLLDDVSVMVDVTSNEVRAIVLRQLENWGATCITPDERQISQEYDLFLTDNPSNLTASGLLLSDDESGVRKIGPGQLRVNFNMSNAMQEAVLQLIEEQLAQEEIPASPLGGDENAELHASGYYALFVDTVPDDVKRLYTEAATSDFAALAQTAHRLKGVFAMLNLVPGKQLCVTLEHLIREKDAPGIEKYISVIDAYVKSLL

SEQ ID NO: 75425 - protein, 216 aa, Salmonella typhi
MNNMNIIIADDHPIVLFGIRKSLEQIEWVNVVGEFEDSTALINNLPKLDAHVLITDLSMPGDKYGDGITLIKYIKRHFPSLSIIVLTMNNNPAILSAVLDLDIEGIVLKQGAPTDLPKALAALQKGKKFTPESVSRLLEKISAGGYGDKRLSPKESEVLRLFAEGFLVTEIAKKLNRSIKTISSQKKSAMMKLGVENDIALLNYLSSVTLSPTDKE

SEQ ID NO: 75426 - protein, 878 aa, Salmonella typhi
MSDLAREITPVNIEEELKSSYLDYAMSVIVGRALPDVRDGLKPVHRRVLYAMNVLGNDWNKAYKKSARVVGDVIGKYHPHGDSAVYDTIVRMAQPFSLRYMLVDGQGNFGSIDGDSAAAMRYTEIRLAKIAHGLMADLEKETVDFVDNYDGTEKIPDVMPTKIPNLLVNGSSGIAVGMATNIPPHNLTEVINGCLAYIDNEDISIEGLMEHIPGPDFPTAAIINGRRGIEEAYRTGRGKVYIRARAEVEADAKTGRETIIVHEIPYQVNKARLIEKIAELVKDKRVEGISALRDESDKDGMRIVIEVKRDAVGEVVLNNLYSQTQLQVSFGINMVALHHGQPKIMNLKDIISAFVRHRREVVTRRTIFELRKARDRAHILEALAIALANIDPIIELIRRAPTPAEAKAALISRPWDLGNVAAMLERAGDDAARPEWLEPEFGVRDGQYYLTEQQAQAILDLRLQKLTGLEHEKLLDEYKELLEQIAELLHILGSADRLMEVIREEMELIRDQFGDERRTEITANSADINIEDLISQEDVVVTLSHQGYVKYQPLTDYEAQRRGGKGKSAARIKEEDFIDRLLVANTHDTILCFSSRGRLYWMKVYQLPEASRGARGRPIVNLLPLEANERITAILPVREYEEGVNVFMATASGTVKKTALTEFSRPRSAGIIAVNLNDGDELIGVDLTSGSDEVMLFSAAGKVVRFKEDAVRAMGRTATGVRGIKLAGDDKVVSLIIPRGEGAILTVTQNGYGKRTAADEYPTKSRATQGVISIKVTERNGSVVGAVQVDDCDQIMMITDAGTLVRTRVSEISVVGRNTQGVILIRTAEDENVVGLQRVAEPVDDEELDAIDGSVTEGDEDIAPEAESDDDVADDADE

SEQ ID NO: 75427 - protein, 205 aa, Salmonella typhi
MNNAAAVLDQNGIAITAGDITVYNYDAENREYLSATVEYLAYGVGIPAHSCIDAPPEKRPGFAVCRDTDQNIWKYVPDHRGETVYSTENGNAVQITQPGDYPPDTTVKQPATIYDVWDGETWVTDAGRQHAAELEAAGAHRQQLEEQAMASVELINLKLRAGRRLTPQETEKLNAVLDFIDVLNATDISTAPDINWPEMPLAAAS

SEQ ID NO: 75428 - protein, 761 aa, Salmonella typhi
MNQSLLVTKRDGRTERINLDKIHRVLDWAAEGLNNVSVSQVELRSHIQFYDGIKTSDIHETIIKAAADLISRDAPDYQYLAARLAIFHLRKKAFGQFEPPALYHHVVKMVELGKYDNHLLEDYTEEEFKQMDSFIVHDRDMTFSYAAVKQLEGKYLVQNRVTGEIYESAQFLYILVVACLFSNYPRETRLDYVKRFYDAVSTFKISLPTPIMSGVRTPTRQFSSCVLIECGDSLDSINATSSAIVKYVSQRAGIGINAGRIRALGSPIRGGEAFHTGCIPFYKHFQTAVKSCSQGGVRGGAATLFYPMWHLEVESLLVLKNNRGVEGNRVRHMDYGIQINKLMYTRLLKGGDITLFSPSDVPGLYDAFFADQDEFERLYVKYENDDSIRKQRVKAVELFSLMMQERASTGRIYIQNVDHCNTHSPFDPVVAPVRQSNLCLEIALPTKPLNDVNDENGEIALCTLSAFNLGAIKTLDELEELAILAVRALDALLDYQDYPIPAAKRGAMGRRTLGIGVINFAYWLAKNGKRYSDGSANNLTHKTFEAIQYYLLKASNELAKEQGACPWFNETTYAKGILPIDTYKKDLDAIVNEPLHYDWEQLRESIKTHGLRNSTLSALMPSETSSQISNATNGIEPPRGYVSIKASKDGILRQVVPDYEHLKDAYELLWEMPNNDGYLQLVGIMQKFIDQSISANTNYDPSRFPSGKVPMQQLLKDLLTAYKFGVKTLYYQNTRDGAEDAQDDLAPSIQDDGCESGACKI

SEQ ID NO: 75429 - protein, 460 aa, Salmonella typhi
MEKKLGLSALTALVLSSMLGAGVFSLPQNMAAVASPAALLIGWAITGVGILLLAFAMLILTRIRSELDGGIFTYAREGFGELIGFCSAWGYWLCAVIANVSYLVIVFSALSFFTDTPALRLFGDGNTWQAIVGASVLLWIVHFLILRGVQTAASINLVATLAKLLPLGAFIVLAIMMFKLDTFTLDFTGVELGIPVWEQVKNTMLITLWVFIGVEGAVVVSARAKNKRDVGRATLLAVLAALGIYLLVTLLSLGVLARPELAEMRNPSMAGLMVKMMGPWGEIIIAAGLIVSVCGAYLSWTIMAAEVPFLAAAYKSFPGIFARQNAQGAPSASLWLTNICVQICLVLIWLTGSDYNTLLTIASEMILVPYFLVGAFLLKIATRPLHRAVGIGACIYGLWLLYASGPMHLLLSVVLYAPGLLVFLYARRTHKHDNVLNRQEVVLIGLLLVAAVPATWMLVG

SEQ ID NO: 75430 - protein, 376 aa, Salmonella typhi
MAYTTFSQTKNDQLKEPMFFGQPVNVARYDQQKYDIFEKLIEKQLSFFWRPEEVDVSRDRIDYQALPEHEKHIFISNLKYQTLLDSIQGRSPNVALLPLISIPELETWVETWAFSETIHSRSYTHIIRNIVNDPAIVFDDIVTNEQIQKRAEGISAYYDELIEMTSYWHLLGEGTHTVNGKTVVVNLRELKKKLYLCLMSVNALEAIRFYVSFACSFAFAERELMEGNAKIIRLIARDEALHLTGTQHMLNLLRSGVDDPEMAEIAEECKQECYDLFVQAAQQEKEWADYLFRDGSMIGLNKDILCQYVEYITNIRMQAVGLDLPFQTRSNPIPWINTWLVSDNVQVAPQEVEVSSYLVGQIDSEVDTDDLSNFQL

SEQ ID NO: 75431 - protein, 383 aa, Salmonella typhi
MKRKVLALVIPALLAAGAAHAAEIYNKDGNKLDLYGKVDGLHYFSDDSSKDGDQTYMRVGFKGETQINDQLTGYGQWEYNVQANTTEGEGANSWTRLAFAGLKFGDYGSFDYGRNYGVLYDVEGWTDMLPEFGGDSYTYADNYMTGRANGVATYRNTDFFGLVDGLNFALQYQGKNESQSADDVNIGTNNRNNGDDIRYDNGDGFGISTTYDIGMGFSAGAAYTTSDRTNEQVNAGGTIAGGDKADAWTAGLKYDANNIYLATMYSETRNMTPYGKTDKGYDGGVANKTQNFEVTAQYQFDFGLRPAVSFLMSKGKDLTYNNVNGDDKDLVKYADVGATYYFNKNFSTYVDYKINLLDDDDPFYKDAGISTDDIVALGMVYQF

SEQ ID NO: 75432 - protein, 396 aa, Salmonella typhi
MSDTRFESCIKCTVCTTACPVSRVNPGYPGPKQAGPDGERLRLKDGALYDEALKYCINCKRCEVACPSDVKIGDIIQRARAKYDTTRPSLRNFILSHTDLMGSVSTPFAPVVNTATALKPVRQLLDYALKIDHRRTLPKYSFGTFRRWYRSVAAQQAKYKDQVAFFHGCFVNYNHPQLGKDLIKVLNAMGTGVQLLSKEKCCGVPLIANGFTDKARKQAISNVESLREAIAVKGIPVIATSSTCTFALRDEYPEVLDVDNAGLREHIELATRWLWRKLDAGKTLPLNPLPLKVVYHTPCHMEKMGWTLYTLELLRQIPGLELTVLDSQCCGIAGTYGFKKENYPTSQSIGAPLFRQIEESGADIVVTDCETCKWQIEMSTSKRCEYPITLLAKALG

SEQ ID NO: 75433 - protein, 317 aa, Salmonella typhi
MSDEALALLFSAVENGDQNCIDLLCNLALRNDNLGHRVEKFLFDLFSGKRSGSPDIDKKINQACLVLHQIANNDITKDNTEWKKLHAPSRLLYMAGSATTDLSKKIGIAHKIMGDQFAQTDQEQVGVENLWCSARMLSSDELAAATLGLVQESPLLSVNYPIGLIHPTTKENILRTQLLEKMAQSGLSENEVFLINTGDHWLICLFYKLAEKIKCLIFNTYHDLNENTKQEIIEAAKITGISENEDIDFIETNLQNNVPNGCGLFCYHTIQLLSNAGQNDPATTLREFAENFLTLSVEEQTLFNTQTRRQIYEYSLQ

SEQ ID NO: 75434 - protein, 391 aa, Salmonella typhi
MQKLINSVQNYAWGSKTALTELYGIANPQQQPMAELWMGAHPKSSSRITTANGETVSLRDAIEKNKTAMLGEAVANRFGELPFLFKVLCAAQPLSIQVHPNKRNSEIGFAKENAAGIPMDAAERNYKDPNHKPELVFALAPFLAMNAFREFSDIVSLLQPVAGAHSAIAHFLQAPNAERLSQLFASLLNMQGEEKSRALAVLKAALNSQQGEPWQTIRVISEYYPDDSGLFSPLLLNVVKLNPGEAMFLFAETPHAYLQGVALEVMANSDNVLRAGLTPKYIDIPELVANVKFEPKPAGELLTAPVKSGAELDFPIPVDDFAFSLHDLALQETSIGQHSAAILFCVEGEAVLRKDEQRLVLKPGESAFIGADESPVNASGTGRLARVYNKL

SEQ ID NO: 75435 - protein, 371 aa, Salmonella typhi
MMVRTLLRLVARWCGIAISKTGGSEMNDKIRVGLIGYGYASKTFHAPLIMGTPGLELAAVSSSDETKVKADWPAVSVVSEPRHLFNDPHIDLIVIPTPNDTHFPLAKAALEAGKHVVVDKPFTVTLSQARELDALARSTGRVLSVFHNRRWDSDFLTLKALLADGVLGEVSLFESHFDRFRPQVRDRWREQGGPGSGIWYDLAPHLLDQAIQLFGLPVSMTVDLAQLRPGAQSTDYFHAILSYPQRRVILHGTMLAAAESARYIVHGSRGSYVKYGLDPQEERLKNGERLPQEDWGYDMRDGVLTLVEGETRKEENWLTLPGNYPAYYAAIRDALNGNGENPVPASQAIQIMELIELGMESAKHRATLCLA

SEQ ID NO: 75436 - protein, 201 aa, Salmonella typhi
MLAFTLRFIKNKRYFAILAGALVIIAGLASQHAWSGNGLPQINGKALAALAKQHPVVVLFRHAERCDRSDNTCLSDSTGITVNGAQDARALGKAFSADIQNYNLYSSNTVRTIQSATWFSAGRSLTADKKMMDCGSGIYASINTLLKKSQNKNIVIFTHNHCLTYIAKNKRGVKFDPDYLNALVMYAENGKLFLDGEFVPG

SEQ ID NO: 75437 - protein, 660 aa, Salmonella typhi
MKAVIFAYHDMGCQGVQAVLDAGYEIAAIFTHADNPAENTFFGSVSRLAAGLGIPVYAPDNVNHPIWVDRIAELAPDIIFSFYYRNLLSEEILHLAPAGAFNLHGSLLPAYRGRAPLNWVLVNGESETGVTLHRMVKRADAGEIVASQRVAIAQDDVALTLHHKLCQAARQLLNSILPTMKCGNIPSVPQRESDATYYGRRRPEDGLIDWHKPVSTVHNLVRAVAAPWPGAFSYNGSQKFTIWSSRICPDAQGALPGSVISVSPLRVACADGALEIITGQAGDGITVQGSQLAQTLGLVAGACLNRPPATSGKRRIRVLILGVNGFIGNHLTERLLDEENYEVYGMDIGSNAISRFLLHPRFHFVEGDISIHSEWIEYHVKKCDVVLPLVAIATPIEYTRNPLRVFELDFEENLRIIRYCVKYRKRVVFPSTSEVYGMCTDASFDEDKSNLIVGPVNKPRWIYSVSKQLLDRVIWAYGEKEGLRFTLFRPFNWMGPRLDSLNAARIGSSRAITQLILNLVEGTPIKLIDGGQQKRCFTDIRDGIEALFRIIVNEGDRCDGKIINIGNPDNEASIQELATLLLDSFDKHPLRCHFPPFAGFQVVESRSYYGKGYQDVAHRKPSIDNARRCLDWEPSIAMRDTVEETLDFFLRSVDIAERAS

SEQ ID NO: 75438 - protein, 125 aa, Salmonella typhi
MGVMWGLISVAIASLAQLSLGFAMMRLPSIAHPLAFISGLGAFNAATLALFAGLAGYLVSVFCWQKTLHMLALSKAYALLSLSYVLVWVASMLLPGLQGAFSLKAMLGVLCIMAGVMLIFLPARS

SEQ ID NO: 75439 - protein, 424 aa, Salmonella typhi; identical to SEQ ID NO: 75331

SEQ ID NO: 75440 - protein, 144 aa, Salmonella typhi
MESPLGSDLARLVRIWRALIDHRLKPLELTQTHWVTLHNIHQLPPDQSQIQLAKAIGIEQPSLVRTLDQLEDKGLISRQTCASDRRAKRIKLTEKAEPLIAEMEEVIHKTRGEILAGISSEEIELLIKLVAKLEHNIMELHSHD

SEQ ID NO: 75441 - protein, 78 aa, Salmonella typhi
MKCILNATGLPLQDLMLGASVYFPPFFKAFALGFVIWLFIHRLLRDRIYSDEIWHPLLMDLSLFTLCVCLGLVLLIVW

SEQ ID NO: 75442 - protein, 289 aa, Salmonella typhi
MVNMSLKTIKYFSTLIVAVVAVLAAWWLWNYYMQSPWTRDGKIRAEQVSVTPQVSGSITQLNIKDNQFVNAGDVLFVIDKTPFHIAELNAQAQLAKAQSDLAKANNEADRRRHLSRNYISAEDLDSANLNVKAMQASVDVALATLKQAQWQLSQTEVKAPVSGWVTNLSTRTGDYASTGKPLFALVDSHSFYVMGYFEETKLRHIREGEPALITLYSGNVKLQGHVGSIGRAIYDQSVESDSGLVPDIKPNVPWVRLAQRVPVRIEFDALPQDITLVSGTTCSVAIGQR

SEQ ID NO: 75443 - protein, 199 aa, Salmonella typhi
MNKQTEHDTREHLLATGEQLCMQRGFTGMGLSELLKTAQVPKGSFYHYFRSKEAFGVAMLERHYACYHQRLTAHFTSGPGNHRDRLLAWYQETLKQFCQQGAISGCLTVKLSAEVCDLSEDMRSTMDKGAQEIMALLARALEDGRNSHCLHFTGQPLPQAQVLYALWLGANLQAKISRSAAPLENALAHVKTIIATPEQ

SEQ ID NO: 75444 - protein, 613 aa, Salmonella typhi
MNMLALTIILPLIGFVLLAFSRGRWSENLSATIGVGSVGLAALVTAFVGMDFFANGKQAFSQPLWTWMSVGNFNIGFNLVLDGLSLTMLSVVTGVGFLIHMFASWYMRGEEGYSRFFAYTNLFIASMVVLVLSDNLLLMYLGWEGVGLCSYLLIGFYYSDPKNGAAAMKAFVVTRVGDVFLAFALFILYNELGTLNFREMVELAPAHFADGNNMLMWATLMLLGGAVGKSAQLPLQTWLADAMAGPTPVSALIHAATMVTAGVYLIARTHGLFLMTPEILHLVGIIGAITLVMAGFAALVQTDIKRVLAYSTMSQIGYMFLALGVQAWDAAIFHLMTHAFFKALLFLASGSVILACHHEQNIFKMGGLRKSIPLVYACFLVGGAALSALPLVTAGFFSKDEILAGAMANGHINLMVAGLVGAFMTSLYTFRMIFIVFHGKEQIHAHAGKGITHHLPLIVLMILSTFVGALIVPPLQGVLPQTTELAHGRVLTLEITSGVVAIAGILIAAWLWLGKRTLVTSIANSAPGHLLGTWWYNAWGFDWLYDKVFVKPFLGIAWLLKRDPLNALMNIPAILSRFAGKGLVLSENGYLRWYVASMSIGAVVVLALLMVLR

SEQ ID NO: 75445 - protein, 135 aa, Salmonella typhi
MRLLHTMLRVGDLQRSIAFYTNVLGMKLLRTSENPEYKYSLAFVGYGPETEEAVIELTYNWGVESYDMGNAYGHIALSVDNAAEACERIRQNGGNVTREAGPVKGGSTIIAFVEDPDGYKIELIEAKDAGRGLGN

SEQ ID NO: 75446 - protein, 341 aa, Salmonella typhi
MATIKDVAKRANVSTTTVSHVINKTRFVAEETRNAVWAAIKELHYSPSAVARSLKVNHTKSIGLLATSSEAAYFAEIIEAVEKNCFQKGYTLILGNAWNNLEKQRAYLSMMAQKRVDGLLVMCSEYPEPLLSMLEEYRHIPMVVMDWGEAKADFTDTVIDNAFAGGYMAGRYLVERGHRDIGVIPGPLERNTGAGRLAGFMKAMEEALINVPDNWIVQGDFEPESGYHAMQQILSQSHRPTAVFCGGDIMAMGALCAADEMGLRVPQDVSVIGYDNVRNARFFTPALTTIHQPKDSLGETAFNMLLDRIVNKREESQSIEVHPRLVERRSVADGPFRDYRR

SEQ ID NO: 75447 - protein, 445 aa, Salmonella typhi
MKNVIRTPETHPLTWRLRDDKQPVWLDEYRSKNGYEGARKALTGLSPDEIVSQVKDAGLKGRGGAGFSTGLKWSLMPKDESMNIRYLLCNADEMEPGTYKDRLLMEQLPHLLVEGMLISAFALKAYRGYIFLRGEYIEAAVHLRRAIAEATEAGLLGKNIMGTGFDFELFVHTGAGRYICGEETALINSLEGRRANPRSKPPFPATSGVWGKPTCVNNVETLCNVPAILANGVEWYQNISKSKDAGTKLMGFSGRVKNPGLWELPFGTIAREILEDYAGGMRDGLKFKAWQPGGAGTDFLTEAHLDLPMEFESIGKAGSRLGTALAMAVDHEIGMVSLVRNLEEFFARESCGWCTPCRDGLPWSVKILRALERGEGQPGDIETLEQLCRFLGPGKTFCAHAPGAVEPLQSAIKYFREEFEAGIKQPFSNTHLINGIQPNLLKERW

SEQ ID NO: 75448 - protein, 166 aa, Salmonella typhi; identical to SEQ ID NO: 72932

SEQ ID NO: 75449 - protein, 213 aa, Salmonella typhi
MFTGIVQGTAKLVSIDEKPNFRTHVVTLPDYMLEGLETGASVAHNGCCLTVTEINGNQISFDLMKETLRITNLGALRVGDEVNVERAAKFSDEIGGHLMSGHIITTAEIAKILTSENNHQVWFKVQDASLMKYILYKGFIGVDGISLTVGEVTPTRFCVHLIPETLERTTLGRKKLGERVNIEIDPQTQAVVDTVERVLATRENVVRNQADIG

SEQ ID NO: 75450 - protein, 312 aa, Salmonella typhi
MINANRPIINLDLDLLRTFVAVADLNTFAAAAAAVCRTQSAVSQQMQRLEQLVGKELFARHGRNKLLSEHGIQLLGYARKILRFNDEACSSLMFSNLQGVLTIGASDESADTILPFLLSRISSVYPKLALDVRVKRNAYMVDMVKSQEVDLVVTTNQPHSLDCLNLRTSPTHWYCAAEYVLQRGEPVPLVLLDDPSPFRDMVLETLNAAGIPWRLAYVASTLLAVRAAVKAGLGVTARPVEMMSPDLRVLGAADGLPPLLDTEYMLCRDPNSQNELAMVIFHAMESYQNPWHYNQFSAEGGDDPLMVEGGFE

SEQ ID NO: 75451 - protein, 215 aa, Salmonella typhi
MLQVYLVRHGETQWNAERRIQGQSDSPLTAKGEQQAMQVGERARSLGITHIISSDLGRTKRTAEIIAQACGCDITFDFRLRELDMGVLEKRQIDSLTEEEEGWRRQLVNGTQDGRIPGGESMQELSDRVHAALASCLELPQGSRPLLVSHGIALGCLVSTILGLPAWAERRLRLRNCSISRIDYQESQWLASGWVVETAGDVSHLDTPALDELQR

SEQ ID NO: 75452 - protein, 449 aa, Salmonella typhi
MLKSPLLWKMITLGGAMILLLIPLMMVRHTIVERADYRSHVEAAIRQSTSGPQKVVGPLVAVPVTELYTVLEEEKEVQYKRSYLYFWLPESLLVEGNQNVEARKIGIYQGQVWHTDMAIKAEFDVARLHELNRPNITLGKPFIVVGVGDARGISAVKAPQVNGEMLTVEPGTGLPESREGIHIPLPDSQWATRNLTLAMSLNLSGTGSFSLVPVGRSSEMTLTSNWPHPNFVGDFLPGKREISGSGFQAQWQTSRFATNLGEQFADAQKVDWDNLPAFSVAVSTPADQYQLTDRATKYAILLITLTFMAFFVFETLTGQRLHPMQYLLVGLSLVMFYLLLLALSEHIGFTPAWIAASLVGALMNSVYLQAVLKGWRNSVLFTLALLALDGVMWGLLRSEDSSLLLGTGVLLLALGGVMFLTRHLDWYSLSCQQRKSLPPVKDDELRLWK

SEQ ID NO: 75453 - protein, 416 aa, Salmonella typhi
MTFSLFGDKFTRHSGITRLMEDLNDGLRTPGAIMLGGGNPAHIPAMQDYFQTLLTEMVESGKAADALCNYDGPQGKTALLNALAVLLRETLGWDIEPQNIALTNGSQSAFFYLFNLFAGRRADGSTKKVLFPLAPEYIGYADSGLEDDLFVSARPNIELLPEGQFKYHVDFEHLHIGEETGMICVSRPTNPTGNVITDEELMKLDRLANQHNIPLVIDNAYGVPFPGIIFSEARPLWNPNIILCMSLSKLGLPGSRCGIIIANDKTITAIANMNGIISLAPGGMGPAMMCEMIKRNDLLRLSETVIKPFYYQRVQQTIAIIRRYLSEERCLIHKPEGAIFLWLWFKDLPITTELLYQRLKARGVLMVPGHYFFPGLDKPWPHTHQCMRMNYVPEPDKIEAGVKILAEEIERAWREG

SEQ ID NO: 75454 - protein, 440 aa, Salmonella typhi
MQAYFDQLDRVRYEGPQSTNPLAFRHYNPDELVLGKRMEDHLRFAACYWHTFCWNGADMFGVGAFNRPWQQPGEALELAKRKADVAFEFFHKLNVPFYCFHDVDVSPKGASLKEYKNNFAQMVDVLAAKQEQSGVKLLWGTANCFTNPRYGAGAATNPDPEVFSCAATQVVTAMNATHKLGGENYVLWGGREGYETLLNTDLRQEREQIGRFMQMVVEHKHKMGFQGTLLIEPKPQEPTKHQYDYDVATVYGFLKQFGLEKEIKVNIEANHATLAGHSFHHEIATAIALGIFGSVDANRGDAQLGWDTDQFPISVEENALVMYEILKAGGFTTGGLNFDAKVRRQSTDKYDLFYGHIGAMDTMALSLKIAARMVEDGELDKRVAKRYAGWNGELGQQILKGQLSLGELAQYAEQHHLAPVHQSGHQELLENLVNRYLFDK

SEQ ID NO: 75455 - protein, 484 aa, Salmonella typhi
MYIGIDLGTSGVKAILLNEQGDVLATYTEKLTVSRPHPLWSEQEPEQWWQATDRAVKGLGRQQSLSGVRALGIAGQMHGATLLDSRQQVLRPAILWNDGRCSEECAWLEKQVPQSRAITGNLMMPGFTAPKLVWVQRHEPDIFYQIDKVLLPKDFLRLRMTGVFASDMSDAAGTMWLDVKKRDWSDVMLNACHLTRQQMPALFEGSDITGTLLPEVASAWGMPAVPVVAGGGDNAAGAVGVGMIDAGQAMLSLGTSGVYFAVSDGFLSKPESAVHSFCHALPERWHLMSVMLSAASCLDWAAKLTGQENVPALIAAAQQADEHADSIWFLPYLSGERTPHNNPQAKGVFFGLTHQHGPAELARAVLEGVGYALADGMDVVHACGVKPASVTLIGGGARSEYWRQMLSDISGLQLDYRTGGDVGPALGAARLAQIAVNKQTPLADVLPQLPLEQAHYPDAQRHAVYQQRRETFRRLYQQLLPLMS

SEQ ID NO: 75456 - protein, 367 aa, Salmonella typhi
MTSRNYLLLTPGPLTTSRTVKEAMLFDSCTWDDDYNIGVVEQIRQQLTALATASEGYTSVLLQGSGSYAVEAVLGSALGPQDKVLIVSNGAYGARMVEMAGLMGIAHHAYDCGEVARPNVQAIDAILNADPTISHIAMVHSETTTGMLNPIDEVGALAHRYGKTYIVDAMSSFGGIPMDIAALHIDYLISSANKCIQGVPGFAFVIAREQKLAACKGRSRSLSLDLYAQWRCMEDNHGKWRFTSPTHTVLAFAQALKELAKEGGVAARHQRYQQNQRSLVAGMRALGFNTLLDDELHSPIITAFYSPEDPQYRFSEFYRRLKEQGFVIYPGKVSQSDCFRIGNIGEVYAADITALLTAIRTAMYWTK

SEQ ID NO: 75457 - protein, 303 aa, Salmonella typhi
MQKFDTRTFQGLILTLQDYWARQGCTIVQPLDMEVGAGTSHPMTCLRALGPEPMATAYVQPSRRPTDGRYGENPNRLQHYYQFQVVIKPSPENIQELYLGSLKELGMDPTIHDIRFVEDNWENPTLGAWGLGWEVWLNGMEVTQFTYFQQVGGLECKLVTGEITYGLERLAMYIQGVDSVYDLVWSDGPLGKTTYGDVFHQNEVEQSTYNFEYADVDFLFTCFEQYEKEAQQLLALENPLPLPAYERILKAAHSFNLLDARKAISVTERQRYILRIRTLTKAVAEAYYASREALGFPMCNKDK

SEQ ID NO: 75458 - protein, 689 aa, Salmonella typhi
MSEKTFLVEIGTEELPPKALRSLAESFAANFTAELDNAGLAHGTVQWFAAPRRLALKVANLAEAQPDREIEKRGPAIAQAFDAEGKPSKAAEGWARGCGITVDQAERLTTDKGEWLLYRAYVKGESTEALLPNMVATSLAKLPIPKLMRWGASDVHFVRPVHTVTLLLGDKVIPATILGIQSDRVIRGHRFMGEPEFTIDNADQYPEILRERGKVIADYEERKAKIKADAEEAARKIGGNADLSESLLEEVASLVEWPVVLTAKFEEKFLAVPSEALVYTMKGDQKYFPVYANDGKLLPNFIFVANIESKDPQQIISGNEKVVRPRLADAEFFFNTDRKKRLEDNLPRLQTVLFQQQLGTLRDKTDRIQALAGWIAEQIGADVNHATRAGLLSKCDLMTNMVFEFTDTQGVMGMHYARHDGEAEDVAVALNEQYQPRFAGDDLPSNPVACALAIADKMDTLAGIFGIGQHPKGDKDPFALRRAALGVLRIIVEKNLNLDLQTLTEEAVRLYGDKLTNASVVDDVIDFMLGRFRAWYQDEGYSVDTIQAVLARRPTRPADFDARMKAVSHFRTLEEASALAAANKRVSNILAKATEPLNDIVHASVLKEAAEIELARHLVVLRDKLQPYFADGRYQEALIELAALRAPVDEFFENVMVNAEEKDIRINRLTLLSKLRELFLQVADISLLQ

SEQ ID NO: 75459 - protein, 70 aa, Salmonella typhi; identical to SEQ ID NO: 42639

SEQ ID NO: 75460 - protein, 663 aa, Salmonella typhi
MFGKLSLDAVPFHEPIVMVTIAAIIVGGLAILAAITYFGKWTYLWKEWLTSVDHKRLGIMYIIVAIVMLLRGFADAIMMRSQQALASAGEAGFLPPHHYDQIFTAHGVIMIFFVAMPFVIGLMNLVVPLQIGARDVAFPFLNNLSFWFTVVGVILVNLSLGVGEFAQTGWLAYPPLSGIEYSPSVGVDYWIWALQLSGIGTTLTGINFFVTILKMRAPGMTMFKMPVFTWASLCANVLIIASFPILTVTVALLTLDRYLGTHFFTNDMGGNMMMYINLIWAWGHPEVYILILPVFGVFSEIAATFSRKRLFGYTSLVWATVCITVLSFIVWLHHFFTMGAGANVNAFFGITTMIIAIPTGVKIFNWLFTMYQGRIVFHSAMMWTIGFIVTFSVGGMTGVLLAVPGADFVLHNSLFLIAHFHNVIIGGVVFGCFAGMTYWWPKAFGFKLNETWGKRAFWFWIIGFFVAFMPLYVLGFMGMTRRLSQQIDPQFHTMLMVAAAGAALIALGILCQLIQIFVSIRDRDQNRDLTGDPWGGRTLEWSTSSPPPFYNFAVVPHVHERDAFWEMKEKGEAYQQPGQYEEIHMPKNSGAGIVIAAFATVFGFAMIWHIWWLAIVGFAGMIISWIVKSFDEDVDYYVPVPEVEKLENQHFDEITKAGLKNGN

SEQ ID NO: 75461 - protein, 318 aa, Salmonella typhi
MRLRKYNKSLGWLSLIAGTALLSGCNSALLDPKGQIGLEQRSLILTAFGLMLIVVIPAILMAVGFAWKYRASNKDAKYSPNWSHSNKVEAVVWTVPILIIIFLAVLTWKTTHALEPSKPLAHDEKPITIEVVSMDWKWFFIYPEQGIATVNEIAFPANTPVYFKVTSNSVMNSFFIPRLGSQIYAMAGMQTRLHLIANEPGTYDGISASYSGPGFSGMKFKAIATKDRAEFDQWVAKAKQSPNTMNDMAAFEKVAMPSEYNKVEYFSSVKPDLFKDVINKFMGHGKSMDMTQPEGEHSSHEGMEGMDMSHAESANSKG

SEQ ID NO: 75462 - protein, 423 aa, Salmonella typhi
MTDKRKDGSGKLLYCSFCGKSQHEVRKLIAGPSVYICDECVDLCNDIIREEIKEVAPHRERSALPTPHEIRTHLDDYVIGQEQAKKVLAVAVYNHYKRLRNGDTSNGVELGKSNILLTGPTGSGKTLLAETLARLLDVPFTMADATTLTEAGYVGEDVENIIQKLLQKCDYDVQKAQRGIVYIDEIDKISRKSDNPSITRDVSGEGVQQALLKLIEGTVAAVPPQGGRKHPQQEFLQVDTSKILFICGGAFAGLDKVIANRVETGSGIGFGATVKAKSDKASEGELLSQVEPEDLIKFGLIPEFIGRLPVVATLNELSEEALVQILKEPKNALTKQYQALFNLEGVDLEFRDEALNAIARKAMARKTGARGLRSIVEAALLDTMYDLPSMEDVEKVVIDESVIAGQSKPLLIYGKPEAQASGE

SEQ ID NO: 75463 - protein, 784 aa, Salmonella typhi
MNPERSERIEIPVLPLRDVVVYPHMVIPLFVGREKSIRCLEAAMDHDKKIMLVAQKEASTDEPGVNDLFTVGTVASILQMLKLPDGTVKVLVEGLQRARISALSDNGEHFSAKAEYLDSPAIDEREQEVLVRTAISQFEGYIKLNKKIPPEVLTSLNSIDDPARLADTIAAHMPLKLADKQSVLEMSDVNERLEYLMAMMESEIDLLQVEKRIRNRVKKQMEKSQREYYLNEQMKAIQKELGEMDDAPDENEALKRKIDAAKMPKEAKEKAEAELQKLKMMSPMSAEATVVRGYIDWMVQVPWNARSKVKKDLRQAQEILDTDHYGLERVKDRILEYLAVQSRVNKIKGPILCLVGPPGVGKTSLGQSIAKATGRKYVRMALGGVRDEAEIRGHRRTYIGSMPGKLIQKMAKVGVKNPLFLLDEIDKMSSDMRGDPASALLEVLDPEQNVAFSDHYLEVDYDLSDVMFVATSNSMNIPAPLLDRMEVIRLSGYTEDEKLNIAKRHLLPKQIERNALKKGELTVDDSAIIGIIRYYTREAGVRSLEREISKLCRKAVKQLLLDKSLKHIEINGDNLHDYLGVQRFDYGRADSENRVGQVTGLAWTEVGGDLLTIETACVPGKGKLTYTGSLGEVMQESIQAALTVVRARAEKLGINPDFYEKRDIHVHVPEGATPKDGPSAGIAMCTALVSCLTGNPVRADVAMTGEITLRGQVLPIGGLKEKLLAAHRGGIKTVLIPFENKRDLEEIPDNVIADLDIHPVKRIEEVLTLALQNEPSGMQVVTAK

SEQ ID NO: 75464 - protein, 90 aa, Salmonella typhi; identical to SEQ ID NO: 73293

SEQ ID NO: 75465 - protein, 275 aa, Salmonella typhi
MESLLTLPLAGEARVRILQITDTHLFAEKHETLLGVNTWESYQAVLEAIRAQQYEYDLIVATGDLAQDQSAAAYQHFAEGIASFRAPCVWLPGNHDFQPAMYSALQEAGISPAKRVLIGEQWQILLLDSQVFGVPHGELSEFQLEWLERKLADAPERQTLLLLHHHPLPAGCSWLDQHSLRNAGELDSVLANFPRVKYLLCGHIHQELDLDWNGRRLLASPSTCVQFKPHCANFTLDTIAPGWRTLELQANGVLETEVHRLQDTRFRPDTASEGY

SEQ ID NO: 75466 - protein, 140 aa, Salmonella typhi
MKRYTPDFPEMMRLCETNFSQLRRLLPRNDAPGETVSYQVGNVQYRLTIVELTRYTTLVTIEQTAPAITYWSLPSLTVRLYHDAMVAEVCSSQQIFRFKARYDYPNKKLHQRDEKHQINQFLADWLRFCLAHGAMAIPVY

SEQ ID NO: 75467 - protein, 543 aa, Salmonella typhi
MRYIKSMTQQKLSFLLALYIGLFMNCAVFYRRFGSYAQEFTIWKGLSAVVELGATVLVTFFLLRLLSLFGRRVWRVLATLVVLFSAGASYYMTFLNVVIGYGIIASVMTTDIDLSKEVVGLHFVLWLIAVSVLPLIFIWSNHCRYTLLRQLRTPGQRFRSAAVVILAGVMVWAPIRLLDVQQKKFERATGIDLPSYGGVVANSYLPSNWLSALGLYAWAQVDESSDNNSLINPARKFTYVAPKDGDDTYVVFIIGETTRWDHMGIFGYERNTTPKLSLRCMFVREGGADNNPQRTLKEQNVFAVLKQLGFSSDLYAMQSEMWFYSNTMADNISYREQIGAEPRNRGKTVDDMLLIDEMQNSLAQNPEGKHLIILHTKGSHFNYTQRYPRSYAQWKPECIGVDSGCTKAQMINSYDNSVTYVDHFITSVFDQLRDKKAIVFYAADHGESINEREHLHGTPRNMAPPEQFRVPMLVWMSDKYLASPQHAQMSAHLKQQAEIKVPRRHVELYDTIMGCLGYTSPNGGINQNNNWCHIPDAQKVAAK

SEQ ID NO: 75468 - protein, 132 aa, Salmonella typhi; identical to SEQ ID NO: 74896

SEQ ID NO: 75469 - protein, 535 aa, Salmonella typhi
MSISLKKSGMLKLGLSLVAMTVAASVQAKTLVYCSEGSPEGFNPQLFTSGTTYDASSVPIYNRLVEFKTGTTEVIPGLAEKWDISEDGKTYTFHLRKGVKWQSSKDFKPTRELNADDVVFSFDRQKNEQNPYHKVSGGSYEYFEGMGLPDLISEVKKVDDHTVQFVLTRPEAPFLADLAMDFASILSKEYADNMLKAGTPEKVDLNPVGTGPFQLVQYQKDSRILYKAFDGYWGTKPKIDRLVFSITPDASVRYAKLQKNECQVMPYPNPADIARMKEDKNINLMEQAGLNVGYLSYNVQKKPLDDVKVRQALTYAVNKEAIIKAVYQGAGVAAKNLIPPTMWGYNDDIKDYGYDPEKAKALLKEAGLEKGFTIDLWAMPVQRPYNPNARRMAEMIQADWAKIGVQAKIVTYEWGEYLKRAKDGEHQTVMMGWTGDNGDPDNFFATLFSCDAAQQGSNYSKWCYKPFEDLIQPARATDDHNKRIELYKQAQVVMHDQAPALIIAHSTVYEPVRKEVKGYVVDPLGKHHFENVSVE

SEQ ID NO: 75470 - protein, 339 aa, Salmonella typhi
MLQFILRRLGLVIPTFIGITLLTFAFVHMIPGDPVMIMAGERGISPERHAQLLAELGLDKPMWQQYLHYIWGVMHGDLGISLKSRIPVWDEFVPRFKATLELGVCAMIFAVAVGIPVGVLAAVKRGSIFDHTAVGLALTGYSMPIFWWGMMLIMLVSVHWNLTPVSGRVSDMVFLDDTNPLTGFMLIDTAIWGEEGNFIDALAHMILPAMVLGTIPLAVIVRMTRSSMLEVLGEDYIRTARAKGLTRMRVIIVHALRNAMLPVVTVIGLQVGTLLAGAILTETIFSWPGLGRWLIDALQRRDYPVVQGGVLLVATMIILVNLLVDLLYGVVNPRIRHKK

SEQ ID NO: 75471 - protein, 217 aa, Salmonella typhi
MNQTLLSSFGTPFERVELALDALREGRGVMVLDDEDRENEGDMIFPAETMTVEQMALTIRHGSGIVCLCITEDRRKQLDLPMMVENNTSAYGTGFTVTIEAAEGVTTGVSAADRVTTVRAAIKDGAKPSDLNRPGHVFPLRAQAGGVLTRGGHTEATIDLMTLAGFKPAGVLCELTNDDGTMARAPECIAFAGQHNMAVVTIEDLVAYRQAHERKAS

SEQ ID NO: 75472 - protein, 337 aa, Salmonella typhi
MSTHEATLQQPLLRAIDLKKHYPVKKGIFSPERLVKALDGVSFNLERGKTLAVVGESGCGKSTLGRLLTMVETPTGGELYYQGQDLLKHDPHAQKLRRQKIQIVFQNPYGSLNPRKKVGQILEEPLLINTSLSKEQRREKALAMMAKVGLKTEHYDRYPHMFSGGQRQRIAIARGLMLDPDVVIADEPVSALDVSVRAQVLNLMMDLQQDMGLSYVFISHDLSVVEHIADEVMVMYLGRCVEKGTKEQIFNNPRHPYTQALLSATPRLNPDDRRERIKLTGELPSPLNPPPGCAFNARCRRRFGPCTQLQPQLKEYDGQLVACFAVDQDENPQKPLS

SEQ ID NO: 75473 - protein, 432 aa, Salmonella typhi
MQDDTLPLNNSNATTTPLSTRLPFTKYDFGWVLLCIGMAIGAGTVLMPVQIGLKGIWVFITAFIIAYPATYIVQDIYLKTLSESETCDDYTDIISHYLGKNWGVFLGVIYFLMIIHGVFIYSLSVVFDSASYIKTFGLTEADLSQSIIYKVAIFAVLVAIASGGEKLLFKISGPMVVVKVGIILIFGLAMIPHWNLDNISAFPAASVFFRDVLLTIPFCFFSAVFIQVLNPMNIAYRKREPDRVLATRMAIRTHRISYITLIAIILFFSFSFTFSISHEEAVSAFEQNISALALAAQVIPGQIIHITSTILNIFAVLTAFFGIYLGFHEALKGIVLNVLSRIMDVKNINPLLLTSGICVFIVVTLVIWVSFRVSVLVFFQLGSPLYGIVACIIPFFLIYKVAQLEKLRGLKTWLILLYGILLCLSPLLKLIE

SEQ ID NO: 75474 - protein, 189 aa, Salmonella typhi
MKLVHIVSGLAVAISLAACADKSADIQTPAPNPNMSITANQSTIQQPNVSGTVWIRQKVALPPDAVLTVTLSDASLADAPSKVLSQKAVRTEGKQAPFSFVLPFNPSDIQPNARILLSAAITVDNKLVFITDSVKPVINNGGTKADLTLVPVQQTAVPVQASGGATTTVPSTSPTQVNPSSAVPAPTQY

SEQ ID NO: 75475 - protein, 516 aa, Salmonella typhi
MTTRHLVSLVTGVLILSVLFPIGLSLWLAHRQVEKRFNEELDIFSSRVALRTERVSDQAKAALTHIASFKGEPCSSAHLLAMRRVSYSFRYVQEVLYLKNSIPVCSSLEKESHIPAFPPPMKITRDGYRAWFTAQNDLGIKRYMAALGSDSYIVMIDPASFIDVIPFGAWPIDVAIIGRERNTVVASSGNLDHAILPLIHHETPLRLENRGIQYAIHPFPEMGITIVSWAPTAPLERSWYRQAFIWLPAGIVTGLLAAAFILRILRRLQSPRHRLQDAIDNREINVHYQPIVSLSSGKIVGAEALARWQQADGTFLSPEIFIALAEQTGLTEPLTRLIIDTVFEDMGSWLKSHPEQHISINLEASDLASETLPTLLSTLLNRSQISPSQIALELTEREFADPKTSAPIVARYRNAGHSIYIDDFGTGYSSLSYLQNLDVDVLKIDKSFVDALEYKNVTPHIIEMAKTLKLKMVAEGIETTRQEQWLRQHGVHYGQGWLYSKPLPATAFILWVEQRL

SEQ ID NO: 75476 - protein, 183 aa, Salmonella typhi
MSDEKQKMIAGALYCPTDETLCQDRLRARQLIHQYNYTTPDEINKRQAILRDLLGRCEDAYIEPSFRCDYGYNIFLGHSFYANFDCVMLDVCPIHIGDNCMLAPGVHIYTATHPLDAVERNSGRELGKPVTIGNNVWIGGRAVVNPGVTIGDNVVVASGAVVTKNVPPDVVVGGNPARIIKKL

SEQ ID NO: 75477 - protein, 1049 aa, Salmonella typhi
MPNFFIDRPIFAWVIAIIIMLAGGLAILKLPVAQYPTIAPPAVTISATYPGADAKTVQDTVTQVIEQNMNGIDNLMYMSSNSDSTGTVQITLTFESGTDADIAQVQVQNKLQLAMPLLPQEVQQQGVSVEKSSSSFLMVVGVINTDGTMTQEDISDYVAANMKDPISRTSGVGDVQLFGSQYAMRIWMNPTELTKYQLTPVDVINAIKAQNAQVAAGQLGGTPPVKGQQLNASIIAQTRLTSTDEFGKILLKVNQDGSQVRLRDVAKIELGGENYDVIAKFNGQPASGLGIKLATGANALDTATAIRAELKKMEPFFPPGMKIVYPYDTTPFVKISIHEVVKTLVEAIILVFLVMYLFLQNFRATLIPTIAVPVVLLGTFAVLAAFGFSINTLTMFGMVLAIGLLVDDAIVVVENVERVMTEEGLPPKEATRKSMGQIQGALVGIAMVLSAVFIPMAFFGGSTGAIYRQFSITIVSAMALSVLVALILTPALCATMLKPVAKGDHGEGKKGFFGWFNRLFDKSTHHYTDSVGNILRSTGRYLLLYLIIVVGMAYLFVRLPSSFLPDEDQGVFLTMVQLPAGATQERTQKVLDEVTDYYLNKEKANVESVFAVNGFGFAGRGQNTGIAFVSLKDWADRPGEKNKVEAITQRATAAFSQIKDAMVFAFNLPAIVELGTATGFDFELIDQAGLGHEKLTQARNQLFGEVAKYPDLLVGVRPNGLEDTPQFKIDIDQEKAQALGVSISDINTTLGAAWGGSYVNDFIDRGRVKKVYVMSEAKYRMLPDDINDWYVRGSDGQMVPFSAFSSSRWEYGSPRLERYNGLPSMEILGQAAPGKSTGEAMAMMEELASKLPSGIGYDWTGMSYQERLSGNQAPALYAISLIVVFLCLAALYESWSIPFSVMLVVPLGVIGALLAATFRGLTNDVYFQVGLLTTIGLSAKNAILIVEFAKDLMDKEGKGLVEAMLEAVRMRLRPILMTSLAFMLGVMPLVISSGAGSGAQNAVGTGVLGGMVTATVLAIFFVPVFFVVVRRRFSRKSEDIEHSHSTEHR

SEQ ID NO: 75478 - protein, 477 aa, Salmonella typhi
MKVNLPAFERAGVMVVGDVMLDRYWYGPTCRISPEAPVPVVKVNTVEERPGGAANVAMNIASLGANARLVGLTGIDDAARALSKTLAEVNVKCDFVSVPTHPTITKLRVLSRNQQLIRLDFEEGFEGVDPQPLHERINQALGSIGALVLSDYAKGALTSVQTMISLARQAGVPVLIDPKGTDFERYRGATLLTPNLSEFEAVAGKCKSEDELVERGMKLIADYDLSALLVTRSEQGMTLLQPNKAPLHMPTQAQEVYDVTGAGDTVIGVLAATLAAGNTLEEACYFANAAAGVVVGKLGTSTVSPIELENAVRGRADTGFGVMTEEELRQAVASARKRGEKVVMTNGVFDILHAGHVSYLANARKLGDRLIVAVNSDASTKRLKGESRPVNPLEQRMIVLGALESVDWVVSFEEDTPQRLIAGILPDLLVKGGDYKPEEIAGSEEVWANGGEVMVLNFEDGCSTTNIIKKIQTESEK

SEQ ID NO: 75479 - protein, 433 aa, Salmonella typhi
MAQEIELKFIVNHDAVDALRNHLHTLGGEHHAPSQLLNIYFETPDNWLRRHDMGLRIRGENGRYEMTMKIAGRVTGGLHQRPEYNVALSEPVLDLTQLPAEVWPDGNLPDGLASSVQPLFSTDFYREKWCLDVDGSRIEIALDLGDVKAGEFAEPICELELELLRGDTRAVLKLAKQLLSQTGLRQGSLSKAARGYHLAQGNAPRENTPTAILRTAAKATVEQGLEASLDLALSQWQYHEELWLRGDESAKEHVLDAMGLVRHALMLFGGIVPRKASAHLRDLLTQAEATMTSAVSAVTAVYSTQTAMAKLALTEWLVTKAWQPFLDAKAQAKMADSFKRFADIHLSRHAAELKKVFGQPLGDKYRDQLPRLTRDIDSVLLLAGYYDAMVAQAWLENWQGLRHAIITGQRIEIEHFRNEAINQQPFWLHSGKR

SEQ ID NO: 75480 - protein, 369 aa, Salmonella typhi
MMTMLRGWITMIVMLTAINAQAACSWPAWEQFKKDYISQQGRVIDPGDARKITTSEGQSYAMFFALAANDRPAFAQLFNWTQNNLAQGSLREHLPAWLWGQKDPDTWSVLDSNSASDGDIWMAWSLLEAGRLWKETRYTEVGTALLKRIAREEVVNVPGLGSMLLPGKIGFAEANSWRFNPSYLPPQLAQYFSRFGAPWSTLRETNLRLLLETSPKGFSPDWVRYESKQGWQLKAEKTLISSYDAIRVYLWTGMMHDGDPQKARLLARFKPMATLTMKNGVPPEKVDVVSGNAQGTGPVGFSAALLPFLQNRGAQAVQRQRVADHFPGSDAYYNYVLTLFGQGWDQHRFRFTVKGELLPDWGQECVSSR

SEQ ID NO: 75481 - protein, 413 aa, Salmonella typhi
MKIYLVGGAVRDALLGLPVKDKDWVVVGATPQEMLDAGYQQVGRDFPVFLHPQTHEEYALARTERKSGSGYTGFTCYAAPDVTLEADLQRRDLTINALARDDDGQIIDPYHGRRDLEARLLRHVSPAFGEDPLRVLRVARFAARYAHLSFRIADETLTLMREMTAAGELEHLTPERVWKETENALTTRNPQVYFQVLRDCGALRVLFPEIDALFGVPAPAKWHPEIDTGVHTLMTLSMAAMLSPQLDVRFATLCHDVGKGLTPKNLWPRHHGHGPVGVKLVEQLCQRLRVPNDLRDLAKLVAAYHDLIHTFPILQPKTIVKLFDAIDAWRKPQRVEQIALTSEADVRGRTGFEASDYPQGRWLREAWQVAQAVPTKEVVEAGFKGIEIREELTKRRIAAVANWKEKRCPNPAS

SEQ ID NO: 75482 - protein, 657 aa, Salmonella typhi
MAMVAAVVMVFVFVFCTVLLFHLVQQNRYNTATQLESIARSVREPLSSAILKADLPGAETILESIKPAGVVSRADVVLPNQFQALRKRFIPERPVPVMVTRLFELPVQISLPVYSLERPANPQPLAYLVLQADSYRMYKFVMSALSTLVTIYSLLSLILTVAIAWCVNRLIVHPLRKIARELNDIPQQELIGHQLALPRLHQDDEIGMLVRSYNLNQQLMQRQREEQTDNAMRFPVSELPNKAFLMALLEQVITRQQTTALIIVTCETLRDTAGVLQETQREILLLTLVEKLKSVLAPRMVLTQVSGYDFAIIAHGVKEPWHAITLGQQILTIINERLPIQGIQLRPSCSIGIAMYYGDLTAEALYGRAVSAAFTARRKGKNQIQFFDPAQMEAAQQRLTEESDILTALDNHQFAIWLQPQVEMRSGNVLSAEALLRMQQPDGSWELPEGLIERIESCGLMVTVGHWVLEESCRQLAAWQERGVTLPLSVNLSALQLMHPGMVSDLLELLNRYRIQPGTLILEVTESRRIDDPHAAVAILRPLRNAGVRIALDDFGMGYAGLRQLQHMKSLPVDILKIDKMFVDGLPDDHSMVTAIILMARSLNLQLIAEGVEDEAQRAWLEQAGVNVAQGFLFARPVPADIFEERYLSHENPDYKS

SEQ ID NO: 75483 - protein, 428 aa, Salmonella typhi
MKTSLFKSLYFQVLTAIAIGILLGHYYPELGAQMKPLGDAFVKLIKMIIAPVIFCTVVTGIAGMESMKAVGRTGAVALLYFEIVSTIALINGLIIVNVVQPGAGMNVDPATLDAQAVAVYAAQAKEQGIIAFLMDVIPGSVIGAFASGNILQVLLFAVLFGFALHRLGSKGQLIFNVIESFSQVIFGIINMIMRLAPIGAFGAMAFTIGKYGVGSLVQLGQLIICFYITCILFVVVVLGTIARVTGFSIFKFIRYIREELLIVLGTSSSESALPRMLDKMEKLGCRKSVVGLVIPTGYSFNLDGTSIYLTMAAVFIAQATNSHMDIFHQITLLVVLLLSSKGAAGVTGSGFIVLAATISAVGHLPVAGLALILGIDRFMSEARALTNLVGNGVATVVVAKWVKELDHQKLDDVLNNRAPDGKTHEISS

SEQ ID NO: 75484 - protein, 203 aa, Salmonella typhi; identical to SEQ ID NO: 74986

SEQ ID NO: 75485 - protein, 337 aa, Salmonella typhi
MRVLGIETSCDETGIAIYDDKKGLLANQLYSQVKLHADYGGVVPELASRDHVRKTVPLIQAALKEAALTASDIDAVAYTAGPGLVGALLVGATVGRSLAFAWNVPAIPVHHMEGHLLAPMLEDNPPDFPFVALLVSGGHTQLISVTGIGQYELLGESIDDAAGEAFDKTAKLLGLDYPGGPMLSKMASQGTAGRFVFPRPMTDRPGLDFSFSGLKTFAANTIRSNGDDEQTRADIARAFEDAVVDTLMIKCKRALESTGFKRLVMAGGVSANRTLRAKLAEMMQKRRGEVFYARPEFCTDNGAMIAYAGMVRFKAGVTADLGVTVRPRWPLAELPAA

SEQ ID NO: 75486 - protein, 71 aa, Salmonella typhi; identical to SEQ ID NO: 43063

SEQ ID NO: 75487 - protein, 1120 aa, Salmonella typhi
MTMLQLYKRSQHFVFITISVLIILLSCQSLAFARGQTNGDLPSKADVQNQLDTLNKQKDLSAQDKLVQQDLIDTLATLEKIERVKEETVQLRQKVAQAPEKMRQATAALNALSDVDNDDEMRKTLSALSLRQLELRVAQVLDDLQNSQNDLAAYNSQLVSLQTQPERVQNAMYTASQQIQQIRNRLDGNNVGEAALRPSQQVLLQAQQALLNAQIDQQRKSLEGNTVLQDTLQKQRDYVTANSNRLEHQLQLLQEAVNSKRLTLTEKTAQEAISPDETARIQANPLVKQELDINHQLSQRLIVATENGNMLMQQNIKVKNWLDRALQSERNIKEQIAVLKGSLLLSRILYQQQQTLPSADELEDMTNRIADLRLEQFEINQQRDALFQSDAFVDKLEEGHTSEVNDEVHDALLQVVEMRRELLDQLNKQLGNQLMMAINLQVNQQQLMSVSKNLKAILTQQIFWVNSNRPMDWDWLKAFPQTLKEQFSAMKITVNWQKAWPAVFIAFLAGLPLLLIAGLIRWRLKWLKAYQQKLAAAVGSLRNDSQLNTPKAILIDLIRALPVCLIILAIGLILLTMQLNISDLLWAFSKKLAMFWLVFGLCWKVLEKEGVAIRHFGMPAQLTSHWRRQIVRISLALLPLHFWSVVAELSPLNLMDDVLGQAVIFLNLLVITLLVWPLCRESWRDKESHGIRLVTVTILSIIPVALMVLTATGYFYTTLRLAGRWIETVYLVIIWNLLYQTVLRGLSVAARRIAWRRALARRQNLVKEGAEGAEPQEEPTIALEQINQQTLRITMLLMLALFGVMFWAIWSDLITVFSYLDSITLWHYNGSEAGAAVVKSVTMGSLLFAIIAAMVAWALIRNLPGLLEVLVLSRLNMRQGASYAITTILNYVIIAVGAMTVFGSLGVSWDKLQWLAAALSVGLGFGLQEIFGNFVSGLIILFERPVRIGDTVTIGTYSGTVSKIRIRATTITDFDRKEVIIPNKAFVTERLINWSLSDTTTRLVIRLGVAYGSDLEKVKRVLLQAAMEHPKVMHDPEPAVFFTTFGASTLDHELRLYVRELRDRSHTVDELNRAIDRLCRENDINIAFNQLEVHLHNAKGDEVTEVKRDLNGGDLAPAAS

SEQ ID NO: 75488 - protein, 55 aa, Salmonella typhi; identical to SEQ ID NO: 73272

SEQ ID NO: 75489 - protein, 642 aa, Salmonella typhi
MSYQVLARKWRPQTFADVVGQEHVLTALANGLSLGRIHHAYLFSGTRGVGKTSIARLLAKGLNCETGITATPCGVCDNCREIEQGRFVDLIEIDAASRTKVEDTRDLLDNVQYAPARGRFKVYLIDEVHMLSRHSFNALLKTLEEPPAHVKFLLATTDPQKLPVTILSRCLQFHLKALDVEQIRHQLEHILNEEHIAHEPRALQLLSRAADGSLRDALSLTDQAIASGDGQVSTQAVSAMLGTLDDDQALSLVEAVVDANGERVMSLINEAAARGIEWEALLVEMLSLLHRIAMVQLSPAALGSDMAAIEQRMRELARTVPPGDLQLYYQTLLIGRKELPWAPDRRMGVEMTLLRALAFHPRMPLPEPETPRQSFAPVAPTAVMTPPQVQQPSAPAPQTSPAPLPASTSQVLAARNQLQRAQGVTKTKKSEPAAASRARPVNNSALERLASVSERVQARPAPSALETTPVKKEAYRWKATTPVVQTKEVVATPKALKKALEHEKTPELAAKLAAEAIERDPWAAQVSQLSLPKLVEQVALNAWKEQNGNAVCLHLRSTQRHLNSSGAQQKLAQALSDLTGTTVELTIVEDDNPAVRTPLEWRQAIYEEKLAQARESIIADNNIQTLRRFFDAELDEESIRPI

SEQ ID NO: 75490 - protein, 109 aa, Salmonella typhi; identical to SEQ ID NO: 56455

SEQ ID NO: 75491 - protein, 581 aa, Salmonella typhi
MAGRIPRVFINDLLARTDIVDLIDVRVKLKKQGKNYHACCPFHNEKTPSFTVNGEKQFYHCFGCGAHGNAIDFLMNYDKLEFVETVEELAAMHNLEIPYEAGTGLSQIERHQRQNLYQLMNGLNDFYQQSLTHPAAKPARDYLQKRGLSAEIIQRFAIGFAPPGWDNALKRFGNNSDNKALLLDAGMLVNNEQGSTYDRFRNRVMFPIRDKRGRVIGFGGRVLGNDTPKYLNSPETDIFHKGRQLYGLYEAQQYSAEPQRLLVVEGYMDVVALAQYDINYAVASLGTSTTADHMHMLFRATNNVICCYDGDRAGRDAAWRALETAMPYMTDGRQVRFMFLPDGEDPDTLVRKEGKAAFEARMEQAQPLSTFLFNSLLPQVDLSSPDGSTQLAALALPLINQVPGDTHRIQLRQTLGLKLGIFDDSQLDRLVPKQAESGVSRPAPQLKRTTMRILIGLLVQNPDLAPLVPPLDALDQNKLPGLGLFKELVKTCLAQPGLTTGQLLELYRGTNDAATLEKLSMWDDIADKAIAEKTFTDSLNHMFDSLLQLRQEELIARDRTHGLSSEERRELWTLNQELARK

SEQ ID NO: 75492 - protein, 660 aa, Salmonella typhi
MPHIVREAPDSRSERQRPKYKYALALNVDSYTVDTNQTNKCGYRLMEQNPQSQLKLLVTRGKEQGYLTYAEVNDHLPEDIVDSDQIEDIIQMINDMGIQVMEEAPDADDLLLAENTTSTDEDAEEAAAQVLSSVESEIGRTTDPVRMYMREMGTVELLTREGEIDIAKRIEDGINQVQCSVAEYPEAITYLLEQYDRVEAEEARLSDLITGFVDPNAEEEMAPTATHVGSELSQEDLDDDEDEDEEDGDDDAADDDNSIDPELAREKFAELRAQYVVTRDTIKAKGRSHAAAQEEILKLSEVFKQFRLVPKQFDYLVNSMRVMMDRVRTQERLIMKLCVEQCKMPKKNFITLFTGNETSETWFNAAIAMNKPWSEKLHDVAEEVQRCLQKLRQIEEETGLTIEQVKDINRRMSIGEAKARRAKKEMVEANLRLVISIAKKYTNRGLQFLDLIQEGNIGLMKAVDKFEYRRGYKFSTYATWWIRQAITRSIADQARTIRIPVHMIETINKLNRISRQMLQEMGREPTPEELAERMLMPEDKIRKVLKIAKEPISMETPIGDDEDSHLGDFIEDTTLELPLDSATTESLRAATHDVLAGLTAREAKVLRMRFGIDMNTDHTLEEVGKQFDVTRERIRQIEAKALRKLRHPSRSEVLRSFLDD

SEQ ID NO: 75493 - protein, 239 aa, Salmonella typhi
MIEQPDSKSAKPLYKQLEDALKEAIARGEYKPGQQIPTENELSVRWQVSRVTVRKALDALTRENLLTRVSGKGTFVSGEKFQRSMTGIMSFSELCQSQGRRPGSRTIKSVFESVDDETKALLNMNDGEKAVVIERIRYADDVAVSLETVHLPPRFAFLLDEDLNNHSLYECLREKYHLWFTHSRKMIELVYASFEVAHYLGVNEGYPLILIKSEMIDNKGELSCVSQQLIVGDKIRFTV

SEQ ID NO: 75494 - protein, 429 aa, Salmonella typhi
MKALNREVIDYFKEHVNPGFLEYRKSVTAGGDYGAVEWQAGSLNTLVDTQGQEFIDCLGGFGIFNVGHRNPVVVSAVQNQLAKQPLHSQELLDPLRAMLAKTLAALTPGKLKYSFFCNSGTESVEAALKLAKAYQSPRGKFTFIATSGAFHGKSLGALSATAKSTFRRPFMPLLPGFRHVPFGNIDAMSMAFSEGKKTGDEIAAVILEPIQGEGGVILPPQGYLTEVRKLCDEFGALMILDEVQTGMGRTGKMFACEHENVQPDILCLAKALGGGVMPIGATIATEEVFSVLFDNPFLHTTTFGGNPLACAAALATINVLLEQNLPAQAEQKGDTLLDGFRQLAREYPNLVHEARGKGMLMAIEFVDNETGYRFASEMFRQRVLVAGTLNNAKTIRIEPPLTLTIELCEQVLKSARNALAAMQVSVEEV

SEQ ID NO: 75495 - protein, 450 aa, Salmonella typhi
MTKHYDYIAIGGGSGGIASINRAAMYGQKCALIEAKELGGTCVNVGCVPKKVMWHAAQIREAIHLYGPDYGFDTTINQFDWSKLIASRTAYIDRIHTSYDNVLGKNNVDVIKGFARFVDAKTIEVNGETITADHILIATGGRPSHPSIPGVEYGIDSDGFFALSALPERVAVVGAGYIAVELAGVINALGAKTHLFVRKHAPLRSFDPMISETLVEVMNAEGPQLHTHAVPKAVVKNADGSLTLELEDGRSETVDCLIWAIGREPSTDNINLAAAGVKTNEKGYIIVDKWQNTNVEGIYAVGDNTGAIELTPVAVAAGRRLSERLFNNKPDEHLDYSNIPTVVFSHPPIGTVGLSEPQAREQYGDEQVKVYKSSFTAMYTAVTTHRQPCRMKLVCVGPEEKIVGIHGIGFGMDEMLQGFAVALKMGATKKDFDNTVAIHPTASEEFVTMR

SEQ ID NO: 75496 - protein, 201 aa, Salmonella typhi; identical to SEQ ID NO: 74908

SEQ ID NO: 75497 - protein, 632 aa, Salmonella typhi
MALLRSIHMKGQETRGFQSEVKQLLHLMIHSLYSNKEIFLRELISNASDAADKLRFRALSNPDLYEGDGELRVRVSFDKDKRTLTIADNGVGMNRDEVIDHLGTIAKSGTKSFLESMGSDQAKDSQLIGQFGVGFYSAFIVADKVTVRTRAAGDKPENGVFWESAGEGEYTVADITKNDRGTEITLHLREGEDEFLDDWRVRSIISKYSDHIALPVEIEKREEKDGETVISWEKINKAQALWTRNKSEIKDDEYNEFYKHIAHDFTDPLTWSHNRVEGKQEYTSLLYIPSQAPWDLWNRDHKHGLKLYVQRVFIMDDAEQFMPNYLRFVRGLIDSNDLPLNVSREILQDSTVTRNLRSALTKRVLQMLEKLAKDDAEKYQTFWKQFGLVLKEGPAEDHANQEAIAKLLRFASTHTDSSAQTVSLEDYVSRMKEGQEKIYYITADSYAAAKNSPHLELLRKKGIEVLLLSDRIDEWMMNYLTEFDGKAFQSVAKADESIEKLADEVDENAKEAEKALEPFVERVKTLLGDRVKEVRLTHRLTDTPAIVTTDADEMSTQMAKLFAAAGQSVPEVKYIFELNPDHVLVKRTADTKDEAQFKEWVELLLDQALFAERGTLEDPNQFIRRMNQLLVS

SEQ ID NO: 75498 - protein, 214 aa, Salmonella typhi; identical to SEQ ID NO: 74913

SEQ ID NO: 75499 - protein, 434 aa, Salmonella typhi
MKFPGKRKSKHYFPVNARDPLLQQIQPEQETNASWVVGIDQTLVDIEAKVDDDFITRYGLSAGHSLVIEDELAEKLYQELTRENLITHQFAGGTIGNTMHNYSVLADDRSVLLGVMCSNIEIGSYAYRYLCNTSSRTDLNYLQAVDGPIGRCFTLIGESGERTFAISPGHMNQLRAESIPEAVIAGASALVLTSYLVRCKPGEPMPDATMKAIEYAKKHNVPVVMTLGTKFVIADNPQWWQAFLKENVSILAMNEEEAEALTGENDPLLAADKALDWVDLVLCTAGPIGLYMAGFTEEEAKRKTQHPLLPGAIAEFNQYEFSRAMRHKDCTNPLRVYSHIAPYMGGPEKIMNTNGAGDGALAALLHDITANSYHRSNVPNSSKHKFTWLTYSSLAQVCKYANRVSYQVLNQHSPRLTRGLPEREDSLEESYWDR

SEQ ID NO: 75500 - protein, 558 aa, Salmonella typhi
MHHATPLITTIVGGLVLAFILGMIANKLRISPLVGYLLAGVLAGPFTPGFVADTKLAPELAELGVILLMFGVGLHFSLKDLMAVKSIAIPGAVAQIAVATLLGMALSAVLGWSLMTGIVFGLCLSTASTVVLLRALEERQLLDSQRGQIAIGWLIVEDLVMVLTLVLLPAVAGMVEKGDVGIASLAVDMGITIGKVVAFIAIMMLVGRRLVPWIMARSAATGSRELFTLSVLALALGIAFGAVELFDVSFALGAFFAGMVLNESELSHRAAHDTLPLRDAFAVLFFVSVGMLFDPLVLIQQPLAVLATLAIIVFGKSIAAFFLVRMFGHSPRTALTIAASLAQIGEFAFILAGLGMALNLLPQAGQNLVLAGAILSIMLNPVLFTLLEKYLAKTETLEEQTLEEAIEEEKQIPVDICNHALLVGFGRVGSLLGEKLLAAGIPLVVIETSRTRVDELRERGIRAVLGNAANEEIMNLAHLDCARWLLLTIPNGYEAGEIVASAREKSPDIEIIARAHYDDEVKYITERGANQVVMGEREIARAMLELLETPPAGEVVAS

SEQ ID NO: 75501 - protein, 280 aa, Salmonella typhi; identical to SEQ ID NO: 75275

SEQ ID NO: 75502 - protein, 217 aa, Salmonella typhi; identical to SEQ ID NO: 72946

SEQ ID NO: 75503 - protein, 344 aa, Salmonella typhi
MTKIPFWSPLTFMIRFAVIGTNWITRQFVDAAHETGKFRLAAVYSRRLEQAQSFANDYPVEHLFTSLEAMAQSDAIEAVYIASPNSLHFSQTQRFLQHKKHVMCEKPLASNLAEVDAAIACARDNQRVLFEAFKTACLPNFLLLRESLPKIGRMHKALLNYCQYSSRYQRYLNGENPNTFNPAFSNGSIMDIGYYCLASAIALWGEPRSVQASANLLESGVDAHGVVVMDYGDFSVTLQHSKVSDSVLASEIQGERGSLVIEKLSECQKVCFAPRGALMQDLTQPQHINTMLYEAGAFAQLIENHAVEHPGLSLSRATAKWLTEIRRQTGVIFPADDLTHPPTA

SEQ ID NO: 75504 - protein, 322 aa, Salmonella typhi
MNTVGTPLLWGGFAVVVVIMLSIDLLLQGRRGAHAMSMKQAAGWSILWVTLSLLFNAAFWWYLAETQGREVADPQALAFLTGYLIEKSLAVDNVFVWLMLFSYFSVPPALQRRVLVYGVLGAIVLRTIMIFAGTWLITQFEWLLYVFGAFLLFTGVKMALAKEDESGIGEKPMVRWLRGHLRMTDTIENEHFFVRKNGLLYATPLLLVLIMVEFSDVIFAVDSIPAIFAVTTDPFIVLTSNLFAILGLRAMYFLLSGVAERFSMLKYGLAVILVFIGIKMLIVDFYHIPIAISLGVVFGILTITLVINTWVNHQRDKKLRAQ

SEQ ID NO: 75505 - protein, 127 aa, Salmonella typhi; identical to SEQ ID NO: 73044

SEQ ID NO: 75506 - protein, 122 aa, Salmonella typhi; identical to SEQ ID NO: 73045

SEQ ID NO: 75507 - protein, 498 aa, Salmonella typhi; identical to SEQ ID NO: 75270

SEQ ID NO: 75508 - protein, 101 aa, Salmonella typhi; identical to SEQ ID NO: 75001

SEQ ID NO: 75509 - protein, 400 aa, Salmonella typhi
MERFDAVIIGAGAAGMFCAAQAGQAGSRVLLIDNGKKPGRKILMSGGGRCNFTNLYVEPAAYLSQNPHFCKSALARYTQWDFIDLVGRYGIAWHEKTLGQLFCDDSAQRIVDMLVAECDKGGVTMRLRSEVLSVERDESGFVLALNGETVTTQKLVIASGGLSMPGLGASPFGYKIAEQFGLKVLPTRAGLVPFTLHKPLLEQLQTLSGVSVPCVITARNGTVFRENLLFTHRGLSGPAVLQISSYWQPGELVSINLLPDLSLEDVLNEQRNAHPNQSLKNTLAMHLPKRLVECLQQLGLIPDVSLRQLNVRDQQTLVDTLTAWQVQPNGTEGYRTAEVTLGGVDTNELSSRTMEARRVPGLYFIGEVMDVTGWLGGYNFQWAWSSAWACAQDLIALKIN

SEQ ID NO: 75510 - protein, 264 aa, Salmonella typhi
MELLNQLKRLCRALRGTPNSWPAIDLSLPGGRHLHLVGSIHMGTRDIAPLPAKLVKKLRQADALVVEADISGNETPFSNLPKCPPLVERLSAGLLNTLEKRVSELGMPLIHFDNQPLWQIAMVLQATQAQRLGLRPDYGIDYQLLQAAREMSLPVQELEGAKHQLELLCDLPDGGMALLDDTLTHWHTNARLLQVMIGWWLEQPPTSIGASLPRTFSQPLYDVLMVKRNEAWRDALLALPPGRYVVAVGALHLYGEGNLPQILK

SEQ ID NO: 75511 - protein, 833 aa, Salmonella typhi
MSQTIDLTLDGLSCGHCVKRVKESLEQRPDVELADVTVTEAHVTGTASADALIETIKQAGYGATLSHPKAKPLTESSIPSEALAAVPHELPVATADEESQQLLLSGMSCASCVTRVQHALQSVPGVTQARVNLAERTALVMGSASAADLVQAVEKAGYGAEAIEDDIKRRERQQETAIATMKRFRWQAIVALAVGIPVMVWGMIGDNMMVTGDNRSLWLAIGLITLAVMVFAGGHFYRNAWKSLLNGTATMDTLVALGTGVAWLYSMSVNLWPQWFPMEARHLYYEASAMIIGLINLGHMLEARARQRSSKALEKLLDLTPPTARVVTEDGEKSVPLADVQPGMLLRLTTGDRVPVDGEITQGEAWLDEAMLTGEPIPQQKGEGDSVHAGTVVQDGSILFRASAVGSHTTLSRIIRMVRQAQSSKPEIGQLADKISAVFVPVVVAIALFSAAIWYFFGPAPQIVYTLVIATTVLIIACPCALGLATPMSIISGVGRAAEFGVLVRDADALQRASTLDTLVFDKTGTLTEGKPQVVAVKTFNGVDEAQALRLAAALEQGSSHPLAHAILEKAGDDKLPQVNGFRTLRGLGVSGEAEGHQLLLGNQALLNEQHVATDDMTAEITAQASQGSTPVLLAIDGKAAALLAVRDPLRSDSIAALERLHNAGYRLVMLTGDNPTTANAIAKEAGIDEVIAGVLPDGKADAIKRLQSQGRQVAMVGDGINDAPALAQADVGIAMGGGSDVAIETAAITLMRHSLMGVADALAISRATLRNMKQNLLGAFIYNSIGIPVAAGILWPFTGTLLNPVVAGAAMALSSITVVSNANRLLRFKPKA

SEQ ID NO: 75512 - protein, 204 aa, Salmonella typhi
MNFNTVFRWHLPFLFLILLTFRAAAADTLLILGDSLSAGYRMTASAAWPSLLNDKWQNKTSVVNASISGDTSQQGLARLPALLQQHHPRWVVVELGGNDGLRGFAPAQTEQTLRKIIQTVKAADAQPLLMQIHLPANYGRRYNESFSAIYPKLAKEFDIPLLPFFMEEVYLKPQWMQDDGIHPNRDAQPFIADWMAKQLTPFLS

SEQ ID NO: 75513 - protein, 132 aa, Salmonella typhi; identical to SEQ ID NO: 75003

SEQ ID NO: 75514 - protein, 328 aa, Salmonella typhi
MGQLIDGVWHDTWYDTKSSGGKFQRSASAFRNWLTADGAPGPSGEGGFAAEKDRYHLYVSLACPWAHRTLIFRKLKGLEPFIPVSVVNPLMLENGWTFDDTFPAATGDTLYQHEFLYQLYLHADPHYSGRVTVPVLWDKKNHTIVSNESAEIIRMFNSAFDGLGAKAGDYYPPALQSKIDELNGWIYDNVNNGVYKAGFATSQQAYDEAVEKVFTALARLEQILGQHRYLTGNQLTEADIRLWTTLVRFDPVYVTHFKCDKYRISDYLNLYGFLRDIYQIPGIAETVNMDHIRHHYFRSHKTINPTGIISVGPWQDLLEPHGHDVRFG

SEQ ID NO: 75515 - protein, 430 aa, Salmonella typhi
MKTSNFQKWLMVILLAIGGGTIFKSMYLREVFYYPWNEFMGVNNTDSGLLMSWLGFVGIVSSSIAGVIIDKVNNTRLIISFTFLAVGVTTLWQSTAPGLATQYVIIGILSFLANGLFLVSMVRATRLIGNASDQGKLFGFLESGRGIAGSAISAVAVAWFAMSATEVEGIGSVLHAYGFLYLALGVLMWFAMPRDNHNSASGEEKAKEKISVHDILAVMKVKEVWFAAFSIFATISFYQGSSYLVPYLSDVYGMTAEHAGIIGMIRAYVLAILIAPVVGLLADKVGSAIKVMNWLFIAGVIGVAMFLVIPQDPAMVWVLIGTLMIVGSINFALRGIMYAQIEEMKVPVRLTGTVMGIMATVGFSPEMFIHALFGYWLDAYKVQGYTYMFIFMGAMFALAVFTSLLLLRNAKTAFKKMDGKPADTFRTAAE

SEQ ID NO: 75516 - protein, 764 aa, Salmonella typhi
MKVNIDTSDMLYAEAWRDFKGTDWKEEINVCDFIQHNYTPYEGDESFLADATPATTALWEKVMAGIRIENATHAPVDFDTNIATTITAHDAGYIEKELEKIVGLQTDKPLKRALHPFGGVNMIKSSFHAYGREMDADFEYTFTDLRKTHNQGVFDVYSPDMLRCRKSSVLTGLPDGYGRGRIIGDYRRVALYGIRYLVRERELQFADLQSNLERGQNLEATIRLREELAEHRRALLQMQEMAAKYGYDISRPARNAQEAVQWLYFAYLAAVKSQNGGAMSLGRTASFLDIYIERDFNAGLLTEQQAQELIDHFIMKIRMVRFLRTPEFDSLFSGDPIWATEVIGGMGLDGRTLVTKNSFRYLHTLHTMGPAPEPNLTILWSEALPVAFKKYAAQVSIVTSSLQYENDDLMRTDFNSDDYAIACCVSPMVIGKQMQFFGARANLAKTLLYAINGGVDEKLKIQVGPKTAPLTDEVLDYDAVMESLDHFMDWLAVQYISALNIIHYMHDKYSYEASLMALHDRDVYRTMACGIAGLSVAADSLSAIRYAQVKPIRDENGLAIDFAIEGEYPQYGNNDERVDSIACDLVKRFMQKISVLPTYRNAVPTQSILTITSNVVYGQKTGNTPDGRRAGTPFAPGANPMHGRDRKGAVASLTSVAKLPFTYAKDGISYTFSIVPAALGKEDAVRKTNLVGLLDGYFHHEAQVEGGQHLNVNVMNREMLLDAIEHPENYPNLTIRVSGYAVRFNALTREQQQDVISRTFTQAM

SEQ ID NO: 75517 - protein, 221 aa, Salmonella typhi; identical to SEQ ID NO: 75266

SEQ ID NO: 75518 - protein, 256 aa, Salmonella typhi
MNNAIFPNKFKAALAAQQVQIGCWSALASPITTEVLGLAGFDWLVLDGEHAPNDVTTLIPQLMALKGSASAPVVRVPTNEPVIIKRMLDIGFYNFLIPFVETQEEAARAVASTRYPPEGIRGVSVSHRANMFGTVPDYFAQSNKNITIIVQIESQLGVDNVDAIAATEGVDGIFVGPSDLAAALGHLGNASHPDVQQTIQHIFARAKAHGKPCGILAPVEADARRYLEWGATFVAVGSDLGAFRASTQKLADTFKK

SEQ ID NO: 75519 - protein, 258 aa, Salmonella typhi
MLRFSANLSMLFTEYDFLERFDKAAQSGFRGVEFMFPYDDDIEVLKRKLRDNNLEHTLHNLPAGDWAAGERGIACIPGREEEFRDGVAAAIRYARALGNKKINCLVGKTPSGFSATEIYDTLVENLRYAANMLAKEDILLLIEPINHFDMPGFHLTGTQQALVLIKDIGSDNIKIQYDIYHMQRMEGELTQTMTAWADKIGHLQIADNPRRGEPGTGEINYDFIFNVIKQSDYDGWVGCEYKPLTTAEAGLSWINQYR

SEQ ID NO: 75520 - protein, 292 aa, Salmonella typhi
MKLGFIGLGIMGSPMAINLARAGHQLHVTTIGPVADELLSLGAVNVETARQVTEFADIIFIMVPDTPQVEEVLFGEHGCAKTSLQGKTIVDMSSISPIGTKRFAQRVNEMDADYLDAPVSGGEIGAREGTLSIMVGGEQKVFDRVKPLFDILGKNITLVGGNGDGQTCKVANQIIVALNIEAVSEALVFASKAGADPVRVRQALMGGFASSRILEVHGERMINRTFEPGFKIALHQKDLNLALQSAKALALNLPNTATCQELFNTCAANGGSQLDHSAMVQALELMANHKLS

SEQ ID NO: 75521 - protein, 453 aa, Salmonella typhi; identical to SEQ ID NO: 74929

SEQ ID NO: 75522 - protein, 284 aa, Salmonella typhi; identical to SEQ ID NO: 75013

SEQ ID NO: 75523 - protein, 304 aa, Salmonella typhi
MIYTLTLNSAIDMNIFSDPLQPNIVNRTHHTEFCPNGKGVNVALVLDHFQIPAHILGIFGGFTGHYIVESLRTRKMPVTPAWVEEPTRINIFIHDGKQEYKLVNPGSYIPDECKKQIITIISQLPDAEYLVISGSLPQGIESRFYAEIMHICQQKNIGVILDISHPSLRQLLEFKPLLIKPNDEEVKAIFGLTVSDDNDAKNTLTTLHALGAQNVLLTLGAKGMYFSNGIDYWFCSAPTVDLVSSACAGDAALAAFLSQWLSTGEVEYALSLASATGADVASSAGLGQLAAIETLLSQIHVRKL

SEQ ID NO: 75524 - protein, 475 aa, Salmonella typhi
MKKIIAVTGCPTGIAHTFMAEEALKNAAKKLSVEIKVETNGASGVENAIQPADLVDIAGVIIAADKDVLPDRFNGLPVIEVPVKEAIHHPAELINKVINGEAPIRKGESTTSTEIIEKESLGRQIYKHLMSGVSNMLPFVVAGGILIAVSLLWGIYSADPNSAEYNATAAMLMKIGQQAFSIMVPVFTAYIAFSISGRPGMVAGFVGGLLANTTGAGFLGGIIAGFAAGYLMLWVKNRLEGLPRQYEGLKSIFIMPLIGVLVIGVLMSLLGQPVAAINNSMMNWLASLQEANPILLGIVVGAMCSFDFGGPVNKAAYVTGTLLLGQGNFYFMAGVSAACITPPLVIALATTFFPKGFSEEERAAGMVNYILGCTHITEGAIPFAAKDPLRVIPMMMIASSISAVLSYSLRIQVPAPHGGFLILPLVSQPLAWVLCILAGSACGAMMLGLWRLWAVRKNSVNTTPVAKAGGQNAAL

SEQ ID NO: 75525 - protein, 457 aa, Salmonella typhi
MFSEIMRYILDLGPTVMLPLVIIVFSKLLGMKLGDCFKSGLHIGIGFVGIGLVIGLMLDSIGPAAKAMAEHFQINLHVIDVGWPGSSPMTWASQIALVAIPVAIGVNVLMLVTRMTRVVNVDIWNIWHMTFTGAMLHLATGSYWLGILGVVVHAAFVYKLGDWFAKDTRDYFGLEGIAIPHGSSAYLSPVAVLVDTIIEKIPGLNRIHFSADDVQKRFGPFGEPVTVGFVMGLVIGVLAGYDTKAVLQLAVKTAAVMLLMPRVIKPIMDGLTPIAKHARKRLQAKFGGQEFLIGLDPALLLGHTSVVSASLIFIPLTILIAVLVPGNQVLPFGDLATIGFFIAMAVAVHQGNLFRTLISGVIIMGITLWIATQTIGLHTQLAANAGALKAGAQVASLDQGGSPITWLLIQLFTWQNIVGFAVIAIIYLAGVLLTWRRARQFVAAEKATALQQSQIAS

SEQ ID NO: 75526 - protein, 347 aa, Salmonella typhi
MKSVVIHAEGDVRVEERPLPQLQAEDDVLVKVVSSGLCGSDIPRIFAQGAHYYPITLGHEFSGYVESYGTGVTDMQPGDAVACVPLLPCFHCPQCERGYFSLCKQYQFVGSRSEGGNAEYVVVKRANLFRLPSDMPIEDGAFIEPITVGLHAFHLAQGCEGKNVIIVGAGTIGLLALQCARELGARSVTAIDINPQKLELAKALGATHTCNSREMTADDIQTALSDIQFDQLVLETAGTPQTVSLAIDITGPRAQLALVGTLHHDLTLTTRTFGLILRKELTLLGSWMNYSAPWPGEEWETAARLLAEKRLQLTPLIAHRGDAESFAEAVKALNGAPMQGKILLQLS

SEQ ID NO: 75527 - protein, 287 aa, Salmonella typhi
MKQNESADNSQGQLFIVPTPIGNLADITQRALEVLQAVDLIAAEDTRHTGLLLQHFGINARLFALHDHNEQQKAETLVAKLKEGQNIALVSDAGTPLINDPGYHLVRTCREAGIRVVPLPGPCAAITALSAAGLPSDRFCYEGFLPAKSKGRRDALKAIEAEPRTLIFYESTHRLLDSLEDMVAVWGESRYVVLARELTKTWETIHGAPVGELLAWVKEDENRRKGEMVLIVEGHKAQEDDLPADALRTLALLQAELPLKKAAALAAEIHGVKKNALYKYALAQQEE

SEQ ID NO: 75528 - protein, 646 aa, Salmonella typhi
MMSYVDWPPLILRHTYYMAEFETTFADLGLKAPILEALTDLGYEKPSPIQAECIPHLLGGRDVLGMAQTGSGKTAAFSLPLLNNLDPELKAPQILVLAPTRELAVQVAEAMTDFSKHMRGVNVVALYGGQRYDVQLRALRQGPQIVVGTPGRLLDHLKRGTLDLSKLSGLVLDEADEMLRMGFIEDVETIMAQIPEGHQTALFSATMPEAIRRITRRFMKEPQEVRIQSSVTTRPDISQSYWTVWGMRKNEALVRFLEAEDFDAAIIFVRTKNATLEVAEALERNGYNSAALNGDMNQALREQTLERLKDGRLDILIATDVAARGLDVERISLVVNYDIPMDSESYVHRIGRTGRAGRAGRALLFVENRERRLLRNIERTMKLTIPEVELPNAELLGKRRLEKFAAKVQQQLESSDLDQYRALLAKIQPSAEGEELDLETLAAALLKMAQGERPLILPPDAPMRPKREFRDRDDRGPRDRNDRGPRGDREERPRRERRDVGDMQLYRIEVGRDDGVEVRHIVGAIANEGDISSRYIGNIKLFASHSTIELPKGMPGEVLQHFTRTRILNKPMNMQLLGDAVPHAGGERRGGGRSFSGERREGGRNFSGERREGGRGDGRRFSGERRESRGPRRDDSTGRRRFGGDA

SEQ ID NO: 75529 - protein, 711 aa, Salmonella typhi
MLNPIVREFQYGQHTVTLETGMMARQATAAVMVSMDDTAVFVTVVGQKKAKPGQDFFPLTVNYQERTYAAGRIPGSFFRREGRPSEGETLIARLIDRPVRPLFPEGFVNEVQVIATVVSVNPQVNPDIVAMIGASAALSLSGIPFNGPIGAARVGYINDQYVLNPTQDELKESKLDLVVAGTEAAVLMVESEAELLSEDTMLGAVVFGHEQQQVVIQAINDLVKEAGKPRWDWQPEAVNDALNARVAALAESRLSDAYRITDKQERYAQVDVIKSETIEQLIAEDETLDANELGEILHAIEKNVVRSRVLAGEPRIDGREKDMIRGLDVRTGVLPRTHGSALFTRGETQALVTATLGTARDAQVLDELMGERTDSFLFHYNFPPYSVGETGMVGSPKRREIGHGRLAKRGVLAVMPDMDKFPYTVRVVSEITESNGSSSMASVCGASLALMDAGVPIKAAVAGIAMGLVKEGDNYVVLSDILGDEDHLGDMDFKVAGSRDGISALQMDIKIEGITKEIMQVALNQAKGARLHILGVMEQAINAPRGDISEFAPRIHTIKISTDKIKDVIGKGGSVIRALTEETGTTIEIEDDGTVKIAATDGEKAKYAIRRIEEITAEIEVGRIYNSKVTRIVDFGAFVAIGGGKEGLVHISQIADKRVEKVTDYLQMGQEVPVKVLEVDRQGRVRLSIKEATEQSQPAAAPEAPASEQAE

SEQ ID NO: 75530 - protein, 151 aa, Salmonella typhi
MSTPDNRSVNFFSLFRRGQHYAKTWPMEKRLAPVFVENRVIRMTRYAIRFMPPVAVFTLCWQIALGGQLGPAVATALFALSLPMQGLWWLGKRSLTPLPPSILNWFYEVRGKLQEAGQALAPVEGKPDYQALADTLKRAFKQLDKTFLDDL

SEQ ID NO: 75531 - protein, 714 aa, Salmonella typhi
MSRIIMLIPTGTSVGLTSVSLGVIRAMERKGVRLSVFKPIAQPRAGGDAPDQTTTIVRANSTLPAAEPLKMSHVESLLSSNQKDVLMEEIIANYHANTKDAEVVLVEGLVPTRKHQFAQSLNYEIAKTLNAEIVFVMSQGTDTPEQLNERIELTRSSFGGAKNTNITGVIINKLNAPVDEQGRTRPDLSEIFDDSSKAQVIKIDPAKLQESSPLPVLGAVPWSFDLIATRAIDMARHLNATIINEGDIKTRRVKSVTFCARSIPHMLEHFRAGSLLVTSADRPDVLVAACLAAMNGVEIGALLLTGGYEMDARISKLCERAFATGLPVFMVNTNTWQTSLSLQSFNLEVPVDDHERIEKVQEYVANYVNADWIESLTATSERSRRLSPPAFRYQLTELARKAGKRVVLPEGDEPRTVKAAAICAERGIATCVLLGNPDEINRVAASQGVELGAGIEIVDPEVVRESYVARLVELRKSKGMTEPVAREQLEDNVVLGTLMLEQDEVDGLVSGAVHTTANTIRPPLQLIKTAPGSSLVSSVFFMLLPEQVYVYGDCAINPDPTAEQLAEIAIQSADSAIAFGIEPRVAMLSYSTGTSGAGSDVEKVREATRLAQEKRPDLMIDGPLQYDAAVMADVAKSKAPNSPVAGRATVFIFPDLNTGNTTYKAVQRSADLISIGPMLQGMRKPVNDLSRGALVDDIVYTIALTAIQASQQQQ

SEQ ID NO: 75532 - protein, 506 aa, Salmonella typhi; identical to SEQ ID NO: 43751

SEQ ID NO: 75533 - protein, 317 aa, Salmonella typhi
MIKLAPAGLKDDIEMRKVYAGFVAGQIEAGSPIIALEADLMSSMAMDSVARDYPQHVINCGIMEANVIGTAAGLALTGRKPFVHTFTAFASRRCFDQLFMALDYQRNNVKVIASDAGVTACHNGGTHMSFEDMGIVRGLAHSVVLEVTDAVMFANILRQLMDLDGFYWLRTIRKQATSIYAPGSTFTIGKGNVLREGDDITLIANGIMVAEALEAARQLEQEGVSAAVIDMFTLKPIDRMLVKNYAEKTRRIVTCENHSIHNGLGSAVAEVLVENCPVPMRRVGVKERYGQVGTQDFLQQEYGLTAAAIVEAAKSLL

SEQ ID NO: 75534 - protein, 463 aa, Salmonella typhi
MFILETLNFVVDILKVPSVLVGLIALIGLVAQKKAFSDVVKGTIKTILGFIVLGGGATVLVGSLNPLGGMFEHAFNIQGIIPNNEAIVSIALEKYGASTALIMAFGMVANIVVARFTRLKYIFLTGHHTFYMACMIGVILTVAGFEGVGLVFTGSLILGLVMAFFPALAQRYMRRITGTDDIAFGHFGTLGYVLSGWIGSLCGKGSRSTEEMNLPKNLSFLRDSSISISLTMMIIYLIMAVSAGREYVEATFSGGQNYLVYAIIMAITFAAGVFIILQGVRLILAEIVPAFTGFSEKLVPNARPALDCPVVYPYAPNAVLIGFLFSFLGGLVGLFLLGQMKLVLILPGVVPHFFTGATAGVFGNATGGRRGAMIGAFANGLLITFLPVLLLPVLGAIGFANTTFSDADFGVIGILLGNLARYLSPMAITGLVVALFALLVAYNVLAKSKKATAEVQENSGAKE

SEQ ID NO: 75535 - protein, 147 aa, Salmonella typhi
MLGTWLSDATITLRESVETWPQALEICGKPLLDAGVIAPEYITAIVQQHQKLGPYYVLAPGLAMPHARPEEGAKGLGLSLLKLQRGVSFGADEFDPVDIIIMLAAPDKHSHIEMISALAELFSSDVDMEKLHQAKNLEDIKTIIDRF

SEQ ID NO: 75536 - protein, 214 aa, Salmonella typhi
MSKPVIVLWSDANFFSPYVLSAWVALQEKGLSFTLKTRDLDQGEHLQPGWRGYALTQRVPVLEADNFELSESSAIAEYLEERFAPPQWERIYPHDLQKRARARQIQAWLRSDLLPLREERPTDVVFAGAKKAPLSEAGKASAAKLFATAEALLGQGTQNLFGEWCIADTDLALMINRLVLHGDDVPASLAAYATFQWQRASVQRFIALSSKRSG

SEQ ID NO: 75537 - protein, 297 aa, Salmonella typhi
MQILITGGTGLIGRHLIPRLLILGHQVTVVTRNPDNARQILDSRVTLWKGLAEREHLNEIDAIINLAGEPIADKRWTSQQKERLCQSRWAITQKLVDLIHASATPPSVLISGSATGYYGDLGDVVVTEDEPPHNEFTHKLCARWEQIACRAQSDQTRVCLLRTGVVLAPQGGILGKMVPPFRLGLGGPVGNGRQYLAWIHIDDMVNGILWLLDNDLRGPFNMVSPYPVHNEQFAHALGRALRRPAIIRIPATAIRLLMGESSVLVLGGQRALPKRLEAAGFAFRWYDLEEALADVIR

SEQ ID NO: 75538 - protein, 228 aa, Salmonella typhi
MLYGFSGVILQGAIVTLELALSSVVLAVLIGLVGAGAKLSQNRVTGLIFEGYTTLIRGVPDLVLMLLIFYGLQIALNVVTDSLGIDQIDIDPMVAGIITLGFIYGAYFTETFRGAFMAVPKGHIEAATAFGFTHGQTFRRIMFPAMMRYALPGIGNNWQVILKATALVSLLGLEDVVKATQLAGKSTWEPFYFAVVCGLIYLVFTTVSNGVLLLLERRYSVGVKRADL

SEQ ID NO: 75539 - protein, 260 aa, Salmonella typhi
MKKLALSLSLVLAFSSATAAFAAIPQKIRIGTDPTYAPFESKNAQGELVGFDIDLAKELCNRINTQCTFVENPLDALIPSLKAKKIDAIMSSLSITEKRQQEIAFTDKLYAADSRLVVAKNSDIQPTVASLKGKRVGVLQGTTQETFGNEHWAPKGIEIVSYQGQDNIYSDLTAGRIDAAFQDEVAASEGFLKQPIGKDYKFGGPAVKDEKLFGVGTGMGLRKEDNELREALNKAFAEMRADGTYEKLAKKYFDFDVYGG

SEQ ID NO: 75540 - protein, 473 aa, Salmonella typhi
MSNTNSGLLGIKDIVFMNVIAILSLRQIPNVAPYGASAMLLWVIAAFCLFFPLAMVCGELSTGWPKDGGIFVWIKEAFGKRIAWIVVVCFLFSCVLFFPLMLQFGFTALGYMIGGGLAENKAFIGIGSAVIFWLLTLMNIRGMEWTKIINSISAWCGVFIPSAILILLAVVWLCTGHQMQTDYTTAKNWIPDLGHWDTIVFLSSMMFAFAGLEVAPMIAGRTRNPQRDFPRAMAVSAAVIVGIYMVGTWALNTLLPAGKTDIVAGVMQAMHAAADTLHMPWLIPVMAICMFFGALGQINSWLVGPIYMLQEASREDNLLGDRIGKLHPVWKTPAFALTIQAIIVTVLCFSTFISPSVAAAYWMLTALTTITYFIPYLVMFPAFWRLRKTQPDTPRSFKIPGKVLPAILPALGFLSIAFAVALLFIPPSQIDMGGYFQYAGKIIGGAVLAVVVAEYIYHRAQKRNARLSMAGGK

SEQ ID NO: 75541 - protein, 304 aa, Salmonella typhi
MSWIERIKSNITPTRKASIPEGVWTKCDSCGQVLYRAELERNLEVCPKCDHHMRMSARNRLHSLLDEGSLVELGSELEPKDVLKFRDSKKYKDRLASAQKETGEKDALVVMKGTLHGMPVVAAAFEFAFMGGSMGSVVGARFVRAVEQALEDNCPLVCFSASGGARMQEALMSLMQMAKTSAALAKMQERGLPYISVLTDPTMGGVSASFAMLGDLNIAEPKALIGFAGPRVIEQTVREKLPPGFQRSEFLIEKGAIDMIVRRPEMRLKLASILAKLMNLPAPNPDAPREGVVVPPAPDQESEA

SEQ ID NO: 75542 - protein, 337 aa, Salmonella typhi
MSEGWNIAILGATGAVGEALLETLAERQFPVGEIYALARHESAGEHLRFGGKSVIVQDAADFDWTQAQLAFFVAGAEASAAWIDDATNAGCLVIDSSGLFALEPDVPLVVPEVNPYVLADYRNRNVIAVADSLTSQLLAALKPLIDQGGLSRIAVTSMLSASAQGKKAVDALAGQSAKLLNGIPIDEDDFFGRQLAFNMLPLLPDREGSVRQERRIVDEVRKILQDDGVMISASVVQSPVFYGHAQMVSFEALRPLAAEEAREAFSRGEDIVLSEETDYPTQVGDASGNPQLSIGCVHNDYGMPEQIQFWSVADNVRFGGALMAVKIAEKLVQEYLY

SEQ ID NO: 75543 - protein, 378 aa, Salmonella typhi
MKILVDENMPYARELFSRLGEVKAVPGRPIPVEELNHADALMVRSVTKVNESLLSGTPINFVGTATAGTDHVDEAWLKQAGIGFSAAPGCNAIAVVEYVFSALLMLAERDGFSLRDRTIGIVGVGNVGSRLQTRLEALGIRTLLCDPPRAARGDEGDFRTLDELVQEADVLTFHTPLYKDGPYKTLHLADETLIRRLKPGAILINACRGPVVDNAALLARLNAGQPLSVVLDVWEGEPDLNVALLEAVDIGTSHIAGYTLEGKARGTTQVFEAYSAFIGREQRVALETLLPAPEFGRITLHGPLDQPTLKRLAHLVYDVRRDDAPLRKVAGIPGEFDKLRKNYLERREWSSLYVMCDDETAAALLCKLGFNAVHHPAH

SEQ ID NO: 75544 - protein, 470 aa, Salmonella typhi
MKKTKIVCTIGPKTESEEMLSKMLDAGMNVMRLNFSHGDYAEHGQRIQNLRNVMSKTGKKAAILLDTKGPEIRTIKLEGGNDVSLKAGQTFTFTTDKSVVGNNEIVAVTYEGFTSDLSVGNTVLVDDGLIGMEVTAIEGNKVICKVLNNGDLGENKGVNLPGVSIALPALAEKDKQDLIFGCEQGVDFVAASFIRKRSDVVEIREHLKAHGGENIQIISKIENQEGLNNFDEILEASDGIMVARGDLGVEIPVEEVIFAQKMMIEKCIRARKVVITATQMLDSMIKNPRPTRAEAGDVANAILDGTDAVMLSGESAKGKYPLEAVSIMATICERTDRVMNSRLDYNNDSRKLRITEAVCRGAVETAEKLKAPLIVVATQGGKSARAVRKYFPDATILALTTNEVTARQLVLSKGVVSQLVKEINSTDDFYRLGKDVALQSGLAQKGDVVVMVSGALVPSGTTNTASVHVL

SEQ ID NO: 75545 - protein, 361 aa, Salmonella typhi
MAGNTIGQLFRVTTFGESHGLALGGIVDGVPPGIPLTEADLQHDLDRRRPGTSRYTTQRREPDQVKILSGVFDGVTTGTSIGLLIENTDQRSQDYSAIKDVFRPGHADYTYEQKYGLRDYRGGGRSSARETAMRVAAGAIAKKYLAEKFGIEIRGCLTQMGDIPLEIKDWRQVELNPFFCPDADKLDALDELMRALKKEGDSIGAKVTVMASGVPAGLGEPVFDRLDADIAHALMSINAVKGVEIGEGFNVVALRGSQNRDEITAQGFQSNHAGGILGGISSGQHIVAHMALKPTSSITVPGRTINRMGEEVEMITKGRHDPCVGIRAVPIAEAMLAIVLMDHLLRHRAQNADVKTEIPRW

SEQ ID NO: 75546 - protein, 248 aa, Salmonella typhi
MLSIKDLQVSVEEKAILRGLNLDIRPGEVHAIMGPNGSGKSTLSATLAGREDYEVTGGSVTFKGKDLLELSPEERAGEGIFMAFQYPVEIPGVSNQFFLQTALNAVRAYRGQASLDRFDFQDLMEEKIALLKMPEDLLTRSVNVGFSGGEKKRNDILQMAVLEPELCILDESDSGLDIDALKIVAEGVNALRDDKRAFIIVTHYQRILDYIKPDYVHVLYQGRIVRSGDFTLVKQLEEQGYGWLTEQQ

SEQ ID NO: 75547 - protein, 715 aa, Salmonella typhi
MTTTSAFMLSVRLDNVAVVAIDVPGEKVNTLKAEFAAQVRAILKQIRENKALQGVVFISAKADNFIAGADINMIGHCQNAQEAETLARQGQQLMAEIQALPVPVIAAIHGACLGGGLEMALACHRRICTDDVKTVLGLPEVQLGLLPGSGGTQRLPRLVGVSTALDMILTGKQLRARQALKAGLVDDVVPQTILLEAAVELAKKERLAQRTLPVRERILAGPLGRALLFRLVRKKTAQKTQGNYPATERIIDVIETGLAQGSSSGYDAEARAFGELAMTPQSQALRAVFFASTEVKKDPGSDAPPGPLNSVGILGGGLMGGGIAWVTACKGGLPVRIKDINTQGINHALKYSWDLLETKVRRRHIKASERDKQLALISGSTDYRGFSHRDLVIEAVFEDLPLKQQMVAEVEQNCATHTIFASNTSSLPIGDIAANAARPEQVIGLHFFSPVEKMPLVEVIPHASTSAQTIATTVKLAKKQGKTPIVVSDKAGFYVNRILAPYINEAIRMLTEGERVEHIDAALVKFGFPVGPIQLLDEVGIDTGTKIIPVLEAAYGERFSAPANVVASILNDDRKGRKNGRGFYLYGEKGRKSKKQVDPAIYKLIGVQGQSRLSAQQVAERCVMLMLNEAARCFDEKVIRSARDGDIGAVFGIGFPPFLGGPFRYMDALGPGEMVATLQRLAALYGPRYAPCEQLVRMAERREHFWTNGETDQGN

SEQ ID NO: 75548 - protein, 436 aa, Salmonella typhi
MRQALPLVTRQGDRIAIVSGLRTPFARQATAFHGIPAVDLGKMVVGELLARSEIPADAIEQLVFGQVVQMPEAPNIAREIVLGTGMNVHTDAYSVSRACATSFQAVANVAESLMAGTIRAGIAGGADSSSVLPIGVSKALARVLVDVNKARTTRQRLTLFSRLRLRDLLPVPPAVAEYSTGLRMGDTAEQMAKTYGITREQQDALAHRSHQRAAQAWAEGKLAEEVMTTYVPPYKNPFAEDNNIRGASTLADYAKLRPAFDRKHGSVTAANSTPLTDGAAAVILMTESRAKELGLRPLGYLRSYAFTAIDVWQDMLLGPAWSTPLALERAGLTMADLTLFDMHEAFAAQTLANLQLLGSERFAREVFGRAQATGEVDDAKFNVLGGSIAYGHPFAATGARMITQTLHELRRRGGGFGLVTACAAGGLGAAMVLEAE

SEQ ID NO: 75549 - protein, 497 aa, Salmonella typhi
MKRTVVASMIGLALCAGCVLSTAQAATAKRPNLVIILADDLGYGDLATYGHRIVKTPNIDKLAQEGVKFTDYYAPAPLCSPSRAGLLTGRMPFRTGIRSWIPEGKDVALGRNELTIANLLKQQGYDTAMMGKLHLNAGGDRTDQPQAKDMGFDYTLVNPAGFVTDATLDNAKERPRYGVVHPTGWIRNGQHIGRADKMSGEFVSSEVVNWLDNKKDDNPFFLYVAFTEVHSPLASPKKYLDMYSQYMTDYQKQHPDLFYGDWADKPWRGTGEYYANISYMDEQVGKVLDKIKAMGEEDNTIVIFTSDNGPVTREARKVYELKLAGETDGLRGRKDNLWEGGIRVPAIIKYGKHIPQGMVTDTPVYGLDWLPTLANMMDFKLPTDRTYDGQSLVPLLKDKTLKRQKPLIFGIDMPFQDDPTDEWAIRDGDWKMIIDRQNKPKYLYNLKTDRFETLNQIGKQPQIEKQLYGKFLKYKKDIDNDSLMKARGDKPTPVTWG

SEQ ID NO: 75550 - protein, 94 aa, Salmonella typhi
MSKCSADETPVCCCMDVGTIMDNSDCTASYSRVFATRAEAEETLAALTEKARSVESEPCQITPTFTEESEGVRLDIDFVFACEAETLIFQLGLR

SEQ ID NO: 75551 - protein, 437 aa, Salmonella typhi
MVMSQKTLFTKSALAVAVAIISTQAWSAGFQLNEFSSSGLGRAYSGEGAIADDAGNVSRNPALITMFDRPTFSAGAVYIDPDVNISGTSPSRRTLDADNIAPTAWVPNVHFVAPINDQFGWGASITSNYGLATEFNDTYAGGSVGGTTDLETMNLNLSGAYRLNEAWSFGLGFDAVYARAKIERFAGDLGQLVAAQNPALAPVAGQILSDTKIAHLNGNQWGFGWNAGILYELDKNNRYALTYRSEVKIDFKGNYSSDLPIAINRFNLPIPTATGGATQSGYLTLNLPEMWEVSGYNRVAPQWAIHYSLAYTSWSQFQELKAKSTAGDTLFEKHEGFKDAYRIALGTTYYYDDNWTFRTGIAFDDSPVPAQNRSISIPDQDRFWLSAGTTYAFNKDASVDVGVSYMHGQSVKINEGPYQFESEGKAWLFGTNFNYAF

SEQ ID NO: 75552 - protein, 372 aa, Salmonella typhi
MVNVRQPRDIAQVLLSVLFLAIMIVACLWIVQPFILGFAWAGTIVIATWPVLLKLQKILWGRRSLAVLVMTLLLVLLFVIPVALLVNSIVDGSGPLIHAVTGGDMTLPDLAWLNNIPLVGAKLYAGWHSLLDMGGSAIMAKVRPYIGTTTIWFVGQAAHIGRFMMHCALMLLFSALLYWRGEQVAMGIRHFACRLAAKRGDAAVLLAAQAIRAVALGVVVTALVQAVLGGVGLAISGVPYATLLTVVMILSCLVQLGPLPVLIPAIIWLYWTGDTTWGTVLLVWSAVVGTLDNVIRPVLIRMGADLPLLLILSGVIGGLIAFGMIGLFIGPVLLAVTWRLFSAWVHEVPAPTNEPEEILEELDDIEEANKQS

SEQ ID NO: 75553 - protein, 251 aa, Salmonella typhi
MKLRLSALALGTTLLVGCASSGTEQQGRSDPFEGFNRTMYNFNFNVLDPYVVRPVAVAWRDYVPQPARNGLSNFTGNLEEPAIMVNYFLQGDPYQGMVHFTRFFLNTLLGMGGFIDVAGMANPKLQRVEPHRFGSTLGHYGVGYGPYMQLPFYGSFTLREDGGDMADTLYPVLSWLTWPMSIGKWTIEGIETRAQLLDSDGLLRQSSDPYIMVREAYFQRHDFIANGGKLKPQENPNAQAIQDELKEIDSE

SEQ ID NO: 75554 - protein, 252 aa, Salmonella typhi
MKTVTVKNLIIGEGMPKIIVSLMGRDINSVKAEALAYREATFDILEWRVDHFMDIASTQSVLTAARVIRDAMPDIPLLFTFRSAKEGGEQTITTQHYLTLNRAAIDSGLVDMIDLELFTGDADVKATVDYAHAHNVYVVMSNHDFHQTPSAEEMVLRLRKMQALGADIPKIAVMPQSKHDVLTLLTATLEMQQHYADRPVITMSMAKEGVISRLAGEVFGSAATFGAVKQASAPGQIAVNDLRSVLMILHNA

SEQ ID NO: 75555 - protein, 277 aa, Salmonella typhi; identical to SEQ ID NO: 72975

SEQ ID NO: 75556 - protein, 640 aa, Salmonella typhi
MEHLKYRPDIDGLRAIAVLSVVIFHYFPSLLPGGFVGVDIFFVISGYLITSIILKSASNKSFSYLDFYKRRVLRIFPALSIVLVSCLIVGWIYLFQDDYKLLGKHVFSGSFFISNFTLWSESGYFDSKSYLKPLLHLWSLGIEEQFYIIWPVVILLCFRSKNHNRNIVLSCATIFIISYAISIFTMASDGGANYYSPASRFWELMAGAIISTLRFIGINTSLSKLMSLLGIILIALSITMIDEKMSFPGYIAIIPILGASLIIASNGNDLVVSKLLSVRPVVFFGLISYPLYLWHWPIYSFYRSIFAGSPDYHELTLLLLLSFFLAILTYYLIEKPLRNSRSKYITAILLALSVFGTGLIGAFIFHINGVKDREINKSASEYASVTDVYNYYKYGELLRGGICHSVQLTAAISNGCIKNGKHNIFIIGDSYAAALFNGLSHYIDNKGSDYIISQMTDGNAPPLFVDGKDDLQRSVITLNNNRINEIKRVQPEVVLLTWSVRGTNGVHDKKLAIDALSLTIKKIKEASPDSRIVFIGPVPEWNANLVKIISNYLSEFKKTPPLYMTYGLNSEISEWDSYFSNNVPKMGIEYISAYKALCNESGCLTRVGNGPDFITAVDWGHLTKPGSDFLFNKIGNKIIK

SEQ ID NO: 75557 - protein, 87 aa, Salmonella typhi; identical to SEQ ID NO: 73064

SEQ ID NO: 75558 - protein, 237 aa, Salmonella typhi
MIASLDELYHSELFFLPVMDENARLVGLEIIATFAAEDGAVRMPTELVAPRLSVEEQYCLFVEKLALLETCQHFFIQHKLIAWLNLPPAISDLLLLDSELFSRAARFPFFEVAINENYPGLNQGKNNETLANLAMHFPLILANFGAGEASTKAIFDGLFKRVMLDKNFIQQRAEMISFEPFMHAIVAQISSSCESLMIAGIDTEAMFARAAPLGFSAFQGGLWPPVPVSQLIKLVQR

SEQ ID NO: 75559 - protein, 312 aa, Salmonella typhi; identical to SEQ ID NO: 74937

SEQ ID NO: 75560 - protein, 312 aa, Salmonella typhi
MKKHAIAVMMIAVFSESVYAESTLFIPDVSPESVTTSLSVGVLNGKSRELVYDTDTGRKLSQLDWKIKNVATLQGDLSWEPYSFMTLDARGWTSLASGSGHMVDHDWMSSEQPGWTDRSIHPDTSANYANEYDLNVKGWLLQGDNYKAGVTAGYQETRFSWTARGGSYIYDNGRYIGNFPHGVRGIGYSQRFEMPYIGLAGDYRINDFECNVLFKYSDWVNAHDNDEHYMRKLTFREKTENSRYYGASIDAGYYITSNAKIFAEFAYSKYEEGKGGTQIIDKTSGNTAYFGGDAAGIANNNYTVTAGLQYRF

SEQ ID NO: 75561 - protein, 944 aa, Salmonella typhi
MSDYKSTLNLPETGFPMRGDLAKREPGMLARWTDDDLYGIIRAAKKGKKTFILHDGPPYANGSIHIGHSVNKILKDIIVKSKGLSGFDSPYVPGWDCHGLPIELKVEQEFGKPGEKFTAAEFRAKCREYAATQVDGQRKDFIRLGVLGDWSHPYLTMDFKTEANIIRALGRIIKNGHLHKGAKPVHWCVDCRSALAEAEVEYYDKTSPSIDVAFRAVDQDAVKAKFGLPGVSGPVSLVIWTTTPWTLPANRAISLAPDFDYALVQIDGQAVILAKDLVESVIQRIGAAEYTILGTVKGAELELLRFTHPFMGFDVPAILGDHVTLDAGTGAVHTAPGHGPDDYVIGQKYGLETANPVGPDGAYLPGTYPTLDGVNVFKANDIVIELLKEKGALLHVEKMQHSYPCCWRHKTPIIFRATPQWFVSMDKEGLRQQSLKEIKGVQWIPDWGQARIESMVANRPDWCISRQRTWGVPMSLFVHKETQELLPIERTLAAMEEVAKRVEVDGIQAWWDLDPKEILGEDADQYEKVPDTLDVWFDSGSTSYSVVDARPEFAGHAADMYLEGSDQHRGWFMSSLMISVAMKGKAPYRQVLTHGFTVDGQGRKMSKSIGNTVSPQDVMNKLGADILRLWVASTDYTGEMAVSDEILKRAADSYRRIRNTARFLLANLNGFNPATDMVKPEEMVVLDRWAVGCAKTAQQEILKAYEAYDFHEVVQRLMRFCSVEMGSFYLDIIKDRQYTAKADSVARRSCQTALYHIAEALVRWMAPIMSFTADEIWGYLPGEREKYVFTGEWYDGLFGLEENEEFNDAFWDDVRYIKDQVNKELENQKANGIKSNLEAKVTLKYADDANGTIKKLKLLGEEVRFIFITSQFVISEQAGGIDDENIQYNAGNTTVQAVVTRAEGDKCPRCWHYTTDVGKVAEHADICGRCVSNIAGNGEQRKFA

SEQ ID NO: 75562 - protein, 326 aa, Salmonella typhi
MLTFARQQQRRNVRWLLSLSLLVLLATLLSLCAGEQWIAPGDWLSARGELFVWQIRLPRTLAVLLVGAALALSGAVMQALFENPLAEPGLLGVSNGAGVGLIAAVLLGQGQLPGWALGLCAIAGALIITLILLRFARRHLSTSRLLLAGVALGIICSALMTWAIYFSTSFDLRQLMYWMMGGFGGVDWQQSWLMIALIPVLIWICCQSQPLNMLALGETSARQLGLPLWLWRNLLVIATGWMVGVSVAMAGAIGFIGLVIPHILRLCGLTDHRVLLPGCALAGAIALLLADVVARLALASAELPIGVVTATLGAPVFIWLLLKSAR

SEQ ID NO: 75563 - protein, 795 aa, Salmonella typhi
MKFSELWLREWVNPAIDSDALANQITMAGLEVDGVEPVAGSFNGVVVGEVVECAQHPNADKLRVTKVNVGGERLLDIVCGAPNCRQGLKVAVATIGAILPGDFKIKAAKLRGEPSEGMLCSFSELGISDDHSGIIELPADAPLGTDIREYLKLDDNTIEISVTPNRADCLGIIGVARDVAVLNKAPLQEPEMAPVTATISDTLLITVEAVDACPRYLGRVVKGINVNAPTPLWMKEKLRRCGIRSIDAVVDVTNYVLLELGQPMHAFDKDRIDGGIVVRMAKEGETVVLLDGSEATLNADTLVIADHHKALGIAGIFGGEHSGVNGETQNVLLECAYFNPLSITGRARRHGLHTDASHRYERGVDPALQYKTIERATRLLLDICGGDAGPIIDVSNEATLPKRATITLRRSKLDRLIGHHIADEQVSDILRRLGCEVTEGQDEWKAVAPTWRFDMEIEEDLVEEVARVYGYNNIPDEPIQAGLIMGTHREADLSLKRVKTMLNDKGYQEVITYSFVDPKVQQLIHPGAEALLLPNPISVEMSAMRLSLWSGLLATVVYNQNRQQNRVRIFETGLRFVPDTQANLGIRQDLMLAGVICGNRYDEHWNLAKETVDFYDLKGDLEAVLDLTGKLGDIQFKAEMNPALHPGQSAAIYLKDERIGFIGVVHPELERKLDLNGRTLVFELEWNKLADRIVPQAREISRFPANRRDIAVVVAENVPAADILSECKKVGVNQVVGVNLFDVYRGKGVAEGYKSLAISLILQDTNRTLEEEEIAATVAKCVEALKERFQASLRD

SEQ ID NO: 75564 - protein, 327 aa, Salmonella typhi; identical to SEQ ID NO: 75254

SEQ ID NO: 75565 - protein, 306 aa, Salmonella typhi
MFPQSKFSRAFLHPRYWLTWFGVGVLWLLVQLPYPVLRFLGTRTGKLARPFLKRRESIAQKNIELCFPTLSREEREKLIAENFHSLGMALLETGMAWFWPDSRVRKWFDVDGLDNLTRAQAQNRGVMVVGVHFMSLELGGRVMGLCQPMMATYRPHNNPLMEWVQTRGRMRSNKAMIGRNNLRGIVGALKKGEAVWFAPDQDYGPKGSSFAPFFAVENVATTNGTYVLSRLSGAAMLTVTMVRKSDNSGYRLYITPEMEGYPADENQAAAYMNKIIEKEIMRAPEQYLWIHRRFKTRPLGEASLYI

SEQ ID NO: 75566 - protein, 118 aa, Salmonella typhi [sequence omitted]

SEQ ID NO: 75567 - protein, 65 aa, Salmonella typhi [sequence omitted]

SEQ ID NO: 75568 - protein, 591 aa, Salmonella typhi
MTIAITDVVLRDAHQSLFATRLRLDDMLPIAAQLDDVGYGSLECWGGATFDACIRFLGEDPWLRLRELKKAMPKTPLQMLLRGQNLLGYRHYADDVVERFVERAVKNGMDVFRVFDAMNDPRNMKAALQAVRSHGAHAQGTLSYTTSPAHTLQTWLDLTEQLLETGVDSIAIKDMSGILTPMAAFELVSEIKKRFEVRLHLHCHATTGMAEMALLKAIEAGVDGVDTAISSMSATYGHPATEALVATLAGTEHDTGLDILKLENIAAYFREVRKKYHAFEGQLKGYDSRILVAQVPGGMLTNLESQLKQQNAADRLDQVLAEIPRVREDLGFIPLVTPTSQIVGTQAVLNVLTGERYKTIAKETAGILKGEYGHTPVPVNAALQARVLEGSAPVTCRPADLLKPELAELEADVRRQAQEKGITLAGNAIDDVLTVALFPQIGLKFLENRHNPAAFEPLPQAEAAQPVAKAEKPAASGIYTVEVEGKAFVVRVSDGGDISQLTTAVPAASSAPVQAAAPAGAGTPVTAPLAGNIWKVIATEGQSVAEGDVLLILEAMKMETEIRAAQAGTVRGIAVKSGDAVSVGDTLMTLA

SEQ ID NO: 75569 - protein, 412 aa, Salmonella typhi
MADSRPERRFTRIDRLPPYVFNITAELKMAARRRGEDIIDFSMGNPDGATPPHIVEKLCTVAQRPDTHGYSTSRGIPRLRRAISHWYQERYDVDIDPETEAIVTIGSKEGLAHLMLATLDHGDTVLVPNPSYPIHIYGAVIAGAQVRSVPLVEGVDFFNELERAIRESYPKPKMMILGFPSNPTAQCVELEFFEKVVALAKRYDVLVVHDLAYADIVYDGWKAPSIMQVPGARDVAVEFFTLSKSYNMAGWRIGFMVGNKTLVSALARIKSYHDYGAFTPLQVAAIAALEGDQQCVRDIAEQYKRRRDVLVKGLHEAGWMVEMPKASMYVWAKIPEQYAAMGSLEFAKKLLNEAKVCVSPGIGFGDYGDTHVRFALIENRDRIRQAVRGIKTMFRADGVLPSHPKPVEASTE

SEQ ID NO: 75570 - protein, 180 aa, Salmonella typhi
MKGGKRVQTARPNRINSEIRAQEVRLTGLEGEQLGIVSLREALEKAEEAGVDLVEISPNAEPPVCRIMDYGKFLYEKSKSSKEQKKKQKVIQVKEIKFRPGTDEGDYQVKLRSLIRFLEEGDKAKITLRFRGREMAHQQIGMEVLNRVKNDLQELAVVESFPTKIEGRQMIMVLAPKKKQ

SEQ ID NO: 75571 - protein, 642 aa, Salmonella typhi
MPVITLPDGSQRHYDHPVSPMDVALDIGPGLAKATIAGRVNGELVDASDLIENDATLSIITAKDEEGLEIIRHSCAHLLGHAIKQLWPHTKMAIGPVVDNGFYYDVDLDRTLTQEDVEALEKRMHELAEKNYDVIKKKVSWHEARETFVKRGESYKVSILDENIAHDDKPGLYHHEEYVDMCRGPHVPNMRFCHHFKLMKTAGAYWRGDSNNKMLQRIYGTAWADKKALNAYLQRLEEAAKRDHRKIGKQLDLYHMQEEAPGMVFWHNDGWTIFRELEVFVRSKLKEYQYQEVKGPFMMDRVLWEKTGHWDNYKDAMFTTSSENREYCIKPMNCPGHVQIFNQGLKSYRDLPLRMAEFGSCHRNEPSGALHGLMRVRGFTQDDAHIFCTEEQIRDEVNACIRMVYDMYSTFGFEKIVVKLSTRPDKRIGSDEMWDRAEADLAVALEENNIPFEYQLGEGAFYGPKIEFTLYDCLDRAWQCGTVQLDFSLPSRLSASYVGEDNERKVPVMIHRAILGSMERFIGILTEEFAGFFPTWLAPVQVVVMNITDSQSEYVNELTQKLQNAGIRVKADLRNEKIGFKIREHTLRRVPYMLVCGDKEVEAGKVAVRTRRGKDLGSLDVNDVIEKLQQEIRSRSLQQLEE

SEQ ID NO: 75572 - protein, 411 aa, Salmonella typhi
MFHPRARTMLLLSLPALIIGVASSLVLIASMKVASVFQQFLWQRLPASIGIAYDSPFWIVGMLTLTGIVVGLIIRYSPGHAGPDPAIEPLISMPVSPSALPGLLLALIIGLAGGVSLGPEHPIMTINIALAAAFGSRLFPRITALDWTILASAGTIGALFGTPVAAALIFSQTLSGSNDIPMWDRLFAPLMAAAAGSLTTSLFFHPHFSLPIAHYTQMRLVDIASGAIVAAIAIAAGMVAVWCLPRLHELLHRLKNPVLILGIGGFILGILGVIGGPLTLFKGLDEMQQMAFSQTLGAGDYFTLAVVKLAALVIAAASGFRGGRIFPAVFIGAALGLMLHAHVEAVPAAITVSCAILGLVLVVTRDGWLSLFMAAVVVPDTNLLPLLCIVMLPAWLLLAGKPLLAANRHEP

SEQ ID NO: 75573 - protein, 332 aa, Salmonella typhi
MIYQPDENRYHTMEYRRCGRSGVKLPAISLGLWHNFGDTTRVENSRALLQRAFDLGITHFDLANNYGPPPGSAECNFGRILQEDFLPWRDELVISTKAGYTMWDGPYGDWGSRKYLIASLDQSLKRMGLEYVDIFYHHRPDPETPLKETMKALDHLVRHGKALYVGISNYPADLARQAIDILEDLGTPCLIHQPKYSLFERWVEDGLLTLLQEKGVGSIAFSPLAGGQLTDRYLNGIPEDSRAASGSRFLKPEQITADKLEKVRRLNELAARRGQKLSQMALAWVLRNDNVTSVLIGASKPSQIEDAVGMLANRRFSAAECAEIDAILEGRF

SEQ ID NO: 75574 - protein, 413 aa, Salmonella typhi
MTDNRVENSSGRAARKLRLALMGPAFIAAIGYIDPGNFATNIQAGASFGYQLLWVVVWANLMAMLIQILSAKLGIATGKNLAEQIRDHYPRPVVWFYWVQAEIIAMATDLAEFIGAAIGFKLILGVSLLQGAVLTGIATFLILMLQRRGQKPLEKVIGGLLLFVAAAYIVELFFSQPDMAQLGKGMVIPALPNPEAVFLAAGVLGATIMPHVIYLHSSLTQHLHGGTRQQRYSATKWDVAIAMTIAGFVNLAMMATAAAAFHFSGHTGIADLDQAYLTLEPLLSHAAATVFGLSLVAAGLSSTVVGTLAGQVVMQGFVRFHIPLWVRRTITMLPSFIVILMGLDPTRILVMSQVLLSFGIALALVPLLIFTSNATLMGELVNTRRVKQIGWIIVVLVVALNIWLLVGTVMGLS

SEQ ID NO: 75575 - protein, 289 aa, Salmonella typhi
MRPRRSMLFIPGANAAMLSTSFVYGADAVMFDLEDAVALREKDTARLLVHHALQHPFYQDVEKVVRINPLNTPFGLADLEAVVRGGADIVRLPKTDSKNDVLELEAQVERIERECGREVGSTRLMAAIESAKGVVNAVDIATSSPRMVAIALAAFDYVMDMGTSRGDGTELFYARCAVLHAARVAGIAAYDVVWSDINNEEGFLKEVQLAKGLGFNGKSLVNPRQIELLHQAYSPTRKEVEHAHEVIAAAEEAESRGLGVVSLNGKMIDGPIIDHARKVVALSASGIRD

SEQ ID NO: 75576 - protein, 273 aa, Salmonella typhi
MHEAQIRVAIAGAGGRMGRQLIQAAMAMEGVQLGAALEREGSSLLGSDAGELAGAGKSGVIVQSSLEAVKDDFDVFIDFTRPEGTLTHLAFCRQHGKGMVIGTTGFDDAGKQAIREASQEIAIVFAANFSVGVNVMLKLLEKAAKVMGDYSDIEIIEAHHRHKVDAPSGTALAMGEAIAGALDKDLKDCAVYSREGYTGERVPGTIGFATVRAGDIVGEHTAMFADIGERVEITHKASSRMTFANGALRSALWLKTKKNGLFDMRDVLGLDVL

SEQ ID NO: 75577 - protein, 382 aa, Salmonella typhi
MIKSALLVLEDGTQFHGRAIGATGSAVGEVVFNTSMTGYQEILTDPSYSRQIVTLTYPHIGNVGTNEADEESSQVHAQGLVIRDLPLIASNFRNTEDLSSYLKRHNIVAIADIDTRKLTRLLREKGAQNGCIIAGDSPDAKLALEKAKAFPGLNGMDLAKEVTTAETYRWTQGSWTLKDGLPEAKSEDDLPFHVVAYDFGAKRNILRMLVDRGCRLTVVPAQTSAEEVLKMNPDGIFLSNGPSDPAPCDYAIEAIKKFLQTDIPVFGICLGHQLLALASGAKTVKMKFGHHGGNHPVKDMDRNVVMITAQNHGFAVDEDSLPANLRVTHKSLFDGTLQGIHRTDKPAFSFQGHPEASPGPHDAAPLFDHFIELIKHYRSSAK

SEQ ID NO: 75578 - protein, 474 aa, Salmonella typhi
MKIKTRFAPSPTGYLHVGGARTALYSWLFARHHGGEFVLRIEDTDLERSTPEAIEAIMDGMNWLNLEWDEGPYFQTKRFDRYNAVIDEMLEAGTAYKCYCSKERLEQLREDQMAKGEKPRYDGRCRHSHEHHADDEPCVVRFANPQDGSVIFDDQIRGPIEFSNQELDDLIIRRTDGSPTYNFCVVVDDWDMEITHVIRGEDHINNTPRQINILKALNAPVPMYAHVSMINGDDGKKLSKRHGAVSVMQYRDDGYLPEALLNYLVRLGWSSGDQEIFTREEMIKLFSLGAVSKSASAFNTDKLLWLNHHYINTLAPEYVATHLQWHIEQENIDTRNGPQLAELVKLLGERCKTLKEMAQSCRYFYEDFSEFDADAAKKHLRPVARQPLEVVRDKLSAITDWSAENVHHAIQATADELEVGMGKVGMPLRVAVTGAGSRLRWMSPYMRLVKPAALSVSTKRWALSPSVKVSSNAS

SEQ ID NO: 75579 - protein, 1075 aa, Salmonella typhi
MPKRTDIKSILILGAGPIVIGQACEFDYSGAQACKALREEGYRVILVNSNPATIMTDPEMADATYIEPIHWEVVRKIIEKERPDAVLPTMGGQTALNCALELERQGVLEEFGVTMIGATADAIDKAEDRRRFDIAMKKIGLDTARSGIAHTMEEALAVAADVGFPCIIRPSFTMGGTGGGIAYNREEFEEICERGLDLSPTNELLIDESLIGWKEYEMEVVRDKNDNCIIVCSIENFDAMGIHTGDSITVAPAQTLTDKEYQIMRNASMAVLREIGVETGGSNVQFAVNPKNGRLIVIEMNPRVSRSSALASKATGFPIAKVAAKLAVGYTLDELMNDITGGRTPASFEPSIDYVVTKIPRFNFEKFAGANDRLTTQMKSVGEVMAIGRTQQESLQKALRGLEVGATGFDPKVSLDDPEALTKIRRELKDAGADRIWYIADAFRAGLSVDGVFNLTNIDRWFLVQIEELVRLEEKVTEVGITGLNADFLRQLKRKGFADARLAKLAGVREGEIRKLRDQYDLHPVYKRVDTCAAEFATDTAYMYSTYEDECEANPSVDRDKIMVLGGGPNRIGQGIEFDYCCVHASLALREDGYETIMVNCNPETVSTDYDTSDRLYFEPVTLEDVLEIVRIEKPKGVIVQYGGQTPLKLARALEAAGVPVIGTSPDAIDRAEDRERFQHAVDRLKLKQPANATVTAIEQAVEKAKEIGYPLVVRPSYVLGGRAMEIVYDEADLRRYFQTAVSVSNDAPVLLDRFLDDAVEVDVDAICDGEMVLIGGIMEHIEQAGVHSGDSACSLPAYTLSQEIQDVMRQQVQKLAFELQVRGLMNVQFAVKDNEVYLIEVNPRAARTVPFVSKATGVPLAKVAARVMAGKSLTEQGVTQEIIPPYYSVKEVVLPFNKFPGVDPLLGPEMRSTGEVMGVGRTFAEAFAKAQLGSNSTMKKQGRALLSVREGDKERVVDLAAKLLKQGFELDATHGTAIVLGEAGINPRLVNKVHEGRPHIQDRIKNGEYTYIINTTAGRRAIEDSRVIRRSALQYKVHYDTTLNGGFATTMALNADATEKVTSVQEMHAQIKKS

SEQ ID NO: 75580 - protein, 750 aa, Salmonella typhi
MSHNEKSPHQSPVHDTRESQPGLDSLAPSDGSHRPTPEPTPPGAQPTAPGSLKAPETANDKLTALDAFRKGSENYALTTNQGVRIADDQNSLRAGSRGPTLLEDFILREKITHFDHERIPERIVHARGSAAHGYFQPYKDLSDITKAAFLCDPQKITPVFVRFSTVQGGAGSADTVRDIRGFATKFYTEEGIFDLVGNNTPIFFIQDAHKFPDFVHAVKPEPHWAIPQGQSAHDTFWDYVSLQPETLHNVMWAISDRGIPRSYRTMEGFGIHTFRLINAQGKATFVRFHWKPLAGKASLVWDESQKLTGRDPDFHRRDLWEAIEAGDFPEYELGLQLIAEEDEFKFDFDLLDPTKLIPEELVPVQRVGKMVLNRNPDNFFAENEQAAFHPGHIVPGIDFTNDPLLQGRLFSYTDTQISRLGGPNFHEIPINRPTCPYHNFQRDGMHRMDIDTNPANYEPNSINDNWPRETPPAPKRGGFESYQERVDGNEIRERSPSFGEYYSHPRLFWLSQTPIEQQHIIDAFSFELGKVARAYIRERVVDQLAHIDVTLAQGVAHNLGFALTHEQTQIAPPPDVNGLKKDPALSLYAVPDGDVKGRVVAILLNDKVNAAELLTIFQALKAKGVHVKLLYSRMGEVTADDGSTLTIAATFAGAPSLTVDAVIVPCGNIADIESCGDARYYLLEAYKHLKPIALAGDARRFKALLNIDSQGEEGLVEADNVDHHFMDTLLTLMAAHRVWSRAGKINAIPA

SEQ ID NO: 75581 - protein, 115 aa, Salmonella typhi
MFDLENVVDNQTAAEELEEVVMGLIINSGQARSLAYGALRKAKEGDFEAAKAMMDQSRIALNEAHLVQTKLIEGDQGEGKMKVSLVLVHAQDHLMASMLARELIAELIELHEKLK

SEQ ID NO: 75582 - protein, 671 aa, Salmonella typhi
MEPIEQQLTELRTTLRHHEYLYHVMDAPEILDAEYDRLMRELRELEAQRPDLITPDSPTQRVGAAPLTAFNQIRHEVPMLSLDNVFDEESFLAFNKRVQDRLKSTENVIWCCELKLDGLAVSILYENGVLVSAATRGDGTTGEDITSNVRTIRAIPLKLHGDNIPARLEVRGEVFLPQTGFEKINEDARRTGGKVFANPRNAAAGSLRQLDPRITAKRPLTFFCYGVGILEGGELPDTHLGRLLQFKAWGLPVSDRVTLCDSPQAVLDFYHNVEKDRPTLGFDIDGVVIKVNSLALQEQLGFVARAPRWAVAFKFPAQEQMTFVRDVEFQVGRTGAITPVARLEPVQVAGVLVSNATLHNADEIERLGLRIGDKVVIRRAGDVIPQVVNVVLSERPEETRPIVFPTHCPVCGSDVERVEGEAVTRCTGGLICGAQRKESLKHFVSRRAMDVDGMGDKIIDQLVEREYVHTPADLFRLTAGKLTGLDRMGPKSAQNVVNALEKAKATTFARFLYALGIREVGEATAAGLAAYFGTLEALQAATIDELQKVPDVGIVVATHVFNFFAEESNRDVIGQLLAEGVHWPAPVVINAQEIDSPFAGKTVVLTGSLSQMSRDDAKARLVALGAKVAGSVSKKTDLVIAGEAAGSKLAKAQELGITVIDEAEMIRLLGA

SEQ ID NO: 75583 - protein, 505 aa, Salmonella typhi
MKNEKRKSGIEPKVFFPLLIIVGILCWLTVRDLDAANVVINAVFSYVTNVWGWAFEWYMVVMLFSWFWLVFGPYAKKRLGDEKPEFSTASWIFMMFASCTSAAVLFWGSIEIYYYISTPPFGLEPNSTGAKEIGLAYSLFHWGPLPWATYSFLSVAFAYFFFVRKMDVIRPSSTLVPLVGEKHAKGLFSTIVDNFYLVALIFAMGTSLGLATPLVTECMQWLFGIPHTLQLDAIIITCWIILNAICVACGLQKGVRIASDVRSYLSFLMLGWVFIVSGASFIMNYFTDSVGMLLMHLPRMLFYTDAIGKGGFPQGWTVFYWAWWVIYAIQMSIFLARISRGRTVRELCFGMVMGLTASTWILWTVLGSNTLLLMDKNILNIPQLIEQHGVARAIIETWAALPLSTATMWGFFILCFIATVTLINACSYTLAMSTCREVRDGEEPPLLVRIGWSVLVGIIGIVLLALGGLKPIQTAIIAGGCPLFFVNIMVTLSFIKDAKVHWKDK

SEQ ID NO: 75584 - protein, 452 aa, Salmonella typhi; identical to SEQ ID NO: 73325

SEQ ID NO: 75585 - protein, 328 aa, Salmonella typhi [sequence omitted]

SEQ ID NO: 75586 - protein, 323 aa, Salmonella typhi; identical to SEQ ID NO: 74982

SEQ ID NO: 75587 - protein, 275 aa, Salmonella typhi
MTLQQEIIQALGAKPHINPEEEIRRSVDFLKAYLKTYPFLKSLVLGISGGQDSTLAGKLSQMAITELREETGDNALQFIAVRLPYGVQADEQDCQDAIAFIQPDRVLTVNIKGAVLASEQALREAGIELSDFVRGNEKARERMKAQYSIAGMTHGVVVGTDHAAEAITGFFTKYGDGGTDINPLHRLNKRQGKQLLAALGCPEHLYKKVPTADLEDDRPSLPDEAALGVTYDNIDDYLEGKTLDSAIAKTIEGWYVKTEHKRRLPITVFDDFWKK

SEQ ID NO: 75588 - protein, 161 aa, Salmonella typhi
MRKLTALFVASTLAMGAANLAHAAETTTAAPADAKPMMQHKGKFGPHHDMMFKNLNLTDAQKQQIRDIIKAQREQMERPLLEERRAMHDIIASDTFDKAKAEAQITKMEAQRKANMLAHMETQNKIYNVLTPEQKKQYNANFEKRLTERPAQEGKMPAAAE

SEQ ID NO: 75589 - protein, 322 aa, Salmonella typhi
MDNFLALTLSGTTPRVTQGKGAGFRWRWLGHGLLELTPDAPVDRALILSAGIHGNETAPVEMLDKLLSALYSGSLTLTWRVLVVLGNPQALAAGIRYCHSDMNRMFGGRWQSFAESDETRRARELELSLETFFSSGQARVRWHLDLHTAIRGSHHLRFGVLPQRDRPWEADFLAWLGAAGLEALVFHQAPGGTFTHFSSEHFGALSCTLELGKALPFGQNDLTQFSVTSQALSALLSGVETSTSFSPPLRYRVVSQITRHSDKFALYMDAQTLNFTAFAKGTLLAEEGDKRVTVTHDVEYVLFPNSSVACGLRAGLMLERLP

SEQ ID NO: 75590 - protein, 428 aa, Salmonella typhi
MTLWINGDWITGQGERRRKTNPVSEEILWQGNDADAAQVAEACQAARAAFPRWARQPFAARQAIVEKFSVLLEAHKADLTEVIARETGKPRWEAATEVTAMINKIAISIKAYHARTGEQKSELVDGAATLRHRPHGVLAVFGPYNFPGHLPNGHIVPALLAGNTLIFKPSELTPWTGETVIKLWERAGLPAGVLNLVQGGRETGQALSSLDDLDGLLFTGSASTGYQLHRQLSGQPEKILALEMGGNNPLIIEDATNMDAAVHLTLQSAFITAGQRCTCARRLLVKQGAQGDAFLARLVDVAGRLQPGRWDDDPQPFIGGLISAQAAQHVMEAWRQREALGGRTLLAPRKVKEGTSLLTPGIIELTGVADVPDEEVFGPLLNVWRYAHFDEAIRLANNTRFGLSCGLVSTDRAQFEQLLLEARAGIVN

SEQ ID NO: 75591 - protein, 159 aa, Salmonella typhi
MISLIAALAVDRVIGMENAMPWNLPADLAWFKRNTLNKPVVMGRHTWESIGRPLPGRKNIIISSQPGTDDRVQWVKSVDEAIAACGDAPEIMVIGGGRVYEQFLPKAQKLYLTHIDAEVEGDTHFPDYEPDDWESVFSEFHDADAQNSHSYCFEILERR

SEQ ID NO: 75592 - protein, 273 aa, Salmonella typhi; identical to SEQ ID NO: 73445

SEQ ID NO: 75593 - protein, 447 aa, Salmonella typhi
MDQTCSLESFLNHVQKRDPHQTEFAQAVREVMTTLWPFLEQNPRYRHMSLLERLVEPERVIQFRVVWLDDKNQVQVNRAWRVQFNSAIGPYKGGMRFHPSVNLSILKFLGFEQTFKNALTTLPMGGGKGGSDFDPKGKSEGEVMRFCQALMTELYRHLGPDTDVPAGDIGVGGREVGFMAGMMRKLSNNSACVFTGKGLSFGGSLIRPEATGYGLVYFTEAMLKRHGLGFEGMRVAVSGSGNVAQYAIEKAMAFGARVVTASDSSGTVVDESGFTPEKLARLCEIKASRDGRVADYAREFGLTYLEGQQPWSVPVDIALPCATQNELDVDAARVLIANGVKAVAEGANMPTTIEATDLFLEAGVLFAPGKAANAGGVATSGLEMAQNAARLSWKAEKVDARLHHIMLDIHHACVKYGGDNKHTNYVQGANIAGFVKVADAMLAQGVI

SEQ ID NO: 75594 - protein, 402 aa, Salmonella typhi
MMLILKAYKFRLEPTPEQSQRLRQLCGCARFVWNLGLAETKRILGSGEKLPSAFELNRMLTVWKKMPGHIFLQDAYTDNLQQKLKDLHTAWKRCFDKKLAAKAPVWKRKNEGRDSIRFVNFEKYCRLENRRVKLPSGLGWVKFRQSQRVNGKIKNATISQLAGQWYISFQVEVETAEPNHTSTTIVGLDAGVTKLATLSDGTVYQPVNSFKASQRKLATLQRQLSRKVRFSSNWQKQKRKVQHLHSHIANIRRDYLHKVTSEISKNHAMIVIEDLKVSNMSKSAKGTAEQHGRNVKAKSGLNRSILDQGWYEMRRQLEYKQLWRGGQVLAVPPAYTSQRCACCGHTAKENRLSQSKFVCQACGYTANADVNGARNILAAGHAVLACGGMVQSGRPSETGTRR

SEQ ID NO: 75595 - protein, 331 aa, Salmonella typhi
MTIKVGINGFGRIGRIVFRAAQKRSDIEIVAINDLLDAEYMAYMLKYDSTHGRFDGTVEVKDGHLIVNGKKIRVTAERDPANLKWDEVGVDVVAEATGIFLTDETARKHITAGAKKVVLTGPSKDNTPMFVKGANFDKYEGQDIVSNASCTTNCLAPLAKVINDNFGIIEGLMTTVHATTATQKTVDGPSHKDWRGGRGASQNIIPSSTGAAKAVGKVLPELNGKLTGMAFRVPTPNVSVVDLTVRLEKAATYEQIKAAVKAAAEGEMKGVLGYTEDDVVSTDFNGEVCTSVFDAKAGIALNDNFVKLVSWYDNETGYSNKVLDLIAHISK

SEQ ID NO: 75596 - protein, 428 aa, Salmonella typhi
MTWFIDRRLNGKNKSTVNRQRFLRRYKAQIKQSISEAINKRSVTDVDSGESVSIPTDDISEPMFHQGRGGLRHRVHPGNDHFIQNDRIERPQSGGGGGSGSGQGQASQDGEGQDEFVFQISKDEYLDLLFEDLALPNLKKNQHRQLNEYKTHRAGFTSNGVPANISVVRSLQNSLARRTAMTAGKRRELHALETELETISHSEPAQLLEEERLRREIAELRAKIERVPFIDTFDLRYKNYEKRPEPSSQAVMFCLMDVSGSMDQATKDMAKRFYILLYLFLSRTYKNVEVVYIRHHTQAKEVDEHEFFYSQETGGTIVSSALKLMDEVVKERYDPSQWNIYAAQASDGDNWADDSPLCHEILAKKLLPVVRYYSYIEITRRAHQTLWREYEHLQATFDNFAMQHIRDQEDIYPVFRELFQKQSANQSA

SEQ ID NO: 75597 - protein, 327 aa, Salmonella typhi
MLKKYLPLLLLCAAPAFAKPVLTVYTYDSFAADWGPGPAVKKAFEADCNCELKLVALEDGVSLLNRLRMEGKNSKADVVLGLDNNLLEAATQTKLFAKSGVANEAVKVPGGWKNDTFVPFDYGYFAFVYDKSKLKNPPKSLKELVESDQKWRVIYQDPRTSTPGLGLLLWMRKVYGDNAPQAWQKLAAKTVTVTKGWSEAYGLFLKGESDLVLSYTTSPAYHIIEEKKDNYAAANFSEGHYLQVEVAARTVASKQPELAEKFLKFMVSPAFQNAIPTGNWMYPVADVALPAGFESLAKPATTLEFTPQQVAAQRQAWISEWQRAVSR

SEQ ID NO: 75598 - protein, 552 aa, Salmonella typhi
MPSGRLQQQFIRLWQCCDGKTQDTTLNELADLLNCSRRHMRTLLNTMQARGWLTWEAEVGRGKRSRLTFLYTGLALQQQRAEDLLEQDRIDQLVQLVGDKSAVRQMLISHLGRSFRQGRHILRVLYYRPMHNLLPGTALRRSETHIARQIFSSLTRVNEENGELEADIAHHWQQISPLLWRFYLRPGIHFHHGRELEMEDVIASLTRINTLPLYSHITKIDSPTAWTLDIHLSQPDRWLPWLLGQVPAMILPREWETLANFASHPIGTGPYAVRRNTPNQLKILAFDDYFGYRALIDEVNVWVLPDISEEPACGLMLEGPIQGGEKAIESRLEEGCYYLLFDARTPRGAHPQVREWVSHVLSPTNLLYHADEPLQQLWFPAYGLLPRWHHARPGPGEKPAGLETLTLTFYREHIEHRVIARIMSALLAEHQVHLHIQEIDYDQWHAGEIESDIWLNSANFTLPLDFSLFAHLCEVPLLQNCIPRDWQDDAAQWRAGEMNLANWCQQLLANKAIVPLIHHWLIIQGQRSMRGLRMNTLGWFDFKSAWFAPPDP

SEQ ID NO: 75599 - protein, 82 aa, Salmonella typhi; identical to SEQ ID NO: 73468

SEQ ID NO: 75600 - protein, 491 aa, Salmonella typhi
MAKQKKRGFFSWLGFGDKEQKQEQTEEQQIVEEQRPVEPPVETAADVDAQTPAHSKAETEAFAEEVVDVTEKVQESEKPQPVEPEPTAAIEMAAPQIAVEREELPLPEEVKDEAISPEEWQAEAETVEVIAAVEEEGENAAKFTDEELEAQALAAQAAEEAVMVVPPAEEDAPVEAIVQEQEKPTKEGFFARLKRSLLKTKENLGSGFISLFRGKKIDDDLFEELEEQLLIADVGVETTRKIIANLTEGASRKQLKDAEALYGLLKDEMGEILAKVDEPLNIEGKTPFVILMVGVNGVGKTTTIGKLARQFEQQGKSVMLAAGDTFRAAAVEQLQVWGQRNNIPVIAQHTGADSASVIFDAIQAAKARNVDVLIADTAGRLQNKSHLMEELKKIVRVMKKLDEEAPHEVMLTIDASTGQNAVSQAKLFHEAVGLTGITLTKLDGTAKGGVIFSVADQFGIPIRYIGVGERIEDLRPFKADDFIEALFARED

SEQ ID NO: 75601 - protein, 425 aa, Salmonella typhi
MKPMHIAMALFSAAMFFVLAGVFMGVQLELDGTKLVVDTAADIRWQWIFIGTAVVFFFQLLRPMFQKAVKHVSGPKFILPAIDGSTVKQKLFLMALLVIAVAWPFMVSRGSVDIATMTMIYIILGLGLNVVVGLSGLLVLGYGGFYAIGAYTFALLNHYYGLGFWTCLPLAGLVSAAAGFLLGFPVLRLRGDYLAIVTLGFGEIVRILLLNNTEITGGPNGISQIPKPTLFGLEFSRNTREGGWDTFSNFFGVKYDPSDRVIFLYLVALLLVVLSLFVINRLLRMPLGRAWEALREDEIACRSLGLSPTRIKLTAFTISAAFAGFAGTLFAARQGFVSPESFTFAESAFVLAIVVLGGMGSQFAVILAAVLLVVSRELMRDFNEYSMLMLGGLMVLMMIWRPQGLLPMTRPQLKLKSGQAKGEQA

SEQ ID NO: 75602 - protein, 438 aa, Salmonella typhi
MISLRHTALGLALSLAFTGQALAVTTIPFWHSMEGELGKEVDSLAQRFNQANPDYKIVPVYKGNYEQNLSAGIAAFRTGNAPAILQVYEVGTATMMASKAIKPVYEVFKDAGINFDESQFVPTVAGYYTDAKSGHLLSQPFNSSTPVLYYNKDAFKKAGLDPEQPPKTWQELADYTAKLRAAGMKCGYASGWQGWIQLENFSAWNGLPFASKNNGFDGTDAVLEFNKPEQVKHIALLEEMNKKGDFSYVGRKDESTEKFYNGDCAMTTASSGSLANIRQYAKFNYGVGMMPYDADIKGAPQNAIIGGASLWVMQGKDKETYTGVAKFLDFLAKPENAAEWHQKTGYLPITTAAYELTREQGYYDKNPGADIATRQMLNKPPLPFTKGLRLGNMPQIRTIVDEELESVWTGKKTPQQALDTAVDRGNQLLRRFEKASKS

SEQ ID NO: 75603 - protein, 246 aa, Salmonella typhi; identical to SEQ ID NO: 73375

SEQ ID NO: 75604 - protein, 580 aa, Salmonella typhi
MKPTFMRWVAIAALLAGGTFSAVANPPVAPPVSYGVEEDVFHPVRATQGMVASVDAMATQVGVDILKQGGNAVDAAVAVGYALAVTHPQAGNLGGGGFMLLRTKDGATTAIDFREMAPAAATRDMFLDDQGNADAKKSLTSHLASGTPGTVAGFSLALEKYGTMPLNKVVRPAMKLAEEGFVVNDALADDLKTYGSEVIPNHENSKAIFWKDGEPLKKGDKLIQKNLAKSLEMIAENGPAAFYKGAIADQIAGEMQKNGGLMTKEDLASYKAVERTPISGDYRGYQVFSMPPPSSGGIHIVQILNILENFDMKKYGFGSADAMQIMAEAEKYAYADRSEYLGDPDFVKVPWQALTNKAYAKTLADQIDINKAKPSSQIKPGKLAPYESNQTTHFSVVDKDGNAVAVTYTLNTTFGTGIVAGNTGILLNNQMDDFSAKPGVPNVYGLVGGDANAVEPKKRPLSSMSPTIVVKDGKTWLVTGSPGGSRIITTVLQMVVNSIDFGMNVAEATNAPRFHHQWLPDELRVEKGFSPDTLKLLEQKGQKVALKEAMGSTQSIMVGPDGELYGASDPRSVDDLTAGY

SEQ ID NO: 75605 - protein, 461 aa, Salmonella typhi
MLKIFNTLTRQKEEFKPIHAGEVGMYVCGITVYDLCHIGHGRTFVAFDVVARYLRFLGYKLKYVRNITDIDDKIIKRANENGESFVALVDRMIAEMHQDFDALNILRPDSEPRATHHIQEIIELTRTLIEKGHAYVADNGDVMFDVPTDPTYGQLSRQDLEQLQAGARVDVVDVKRNPMDFVLWKMSKEGEPSWPSPWGEGRPGWHIECSAMNCKQLGNHFDIHGGGSDLMFPHHENEIAQSTCAHDGEYVNYWMHSGMVMVDREKMSKSLGNFFTVRDVLKYYDAETVRYFLMSGHYRSQLNYSEENLKQARASLERLYTALRGTDKSAAPAGGEAFEARFVEAMNDDFNTPEAYSVLFDMAREVNRLKGEDMTAANAMASHLRKISGVLGLLEQEPDVFLQSGAQADDGEVAEIEALIQQRLDARKAKDWAAADAARDRLTEMGIILEDGPQGTTWRRK

SEQ ID NO: 75606 - protein, 230 aa, Salmonella typhi
MLNSIKLGFIVLLTLFTSLNVQAAGGIALGATRVIYPSAAKQTSLAISNSDTQERYLVNSWIENNAGQKEKTFIVTPPLFVSEPKSENTLRIIYAGQPLPEDRESLFWMNVKAIPSVDKSHIEGKNVLQLAILSRIKLFVRPANLPQTPEDAPTLLKFSRVGNHLKITNPSAYYLTLVNISVGAKKIDNVMIAPKSDMQIPLPTGAQGSVTFQTVNDYGALTSATTASLG

SEQ ID NO: 75607 - protein, 870 aa, Salmonella typhi
MKKTTWFAGRFPGYVSPLSGVALSVLAALCPLTSRGESYFNPAFLSADTASVADLSRFEKGNHQPPGIYRVDIWRNDEFVATQDIRFEAGAVGAGDKSGGLMPCFTPERIKRLGVNTAVFPVSDKGVDTTCIHLPEKIPGAEVAFDFASMRLNISLPQASLLNSARGYIPPEEWDEGIPAALINYSFTGSRGTDSDSYFLSLLSGLNYGPWRLRNNGAWSYSKGDGYHSQRWNNIGTWVQRAIIPLKSELVMGDSHTGNDVFDSVGFRGARLYSSDNMYPDSLQGYAPTVRGIARTAAKLTIRQNGYVIYQSYVPPGAFAITDLNPTSSSGDLEVTVDEKDGSQQRYTVPYSTVPLLQREGRVKYDLVAGDFRSGNSQQSSLFFFQGTVIAGLPAGLTAYGGTQLADRYRAVVVGAGQNLGDWGAVSVDVTHARSQLADDSTHQGQSLRFLYAKSLNNYGTNFQLLGYRYSTRGFYTLDDVAYRSMEGYDYEYDSDGRRHKVPVAQSYHNLRYSKKGRFQVNISQNLGNYGSLYLSGSQQNYWNTADTNTWYQLGYASGWQGISYSLSWSWSESVGISGADRILAFNMSVPFSVLTGRRYARDTILDRTYATFNANRNRDGDNSWQTGVGGTLLEGRNLSYSVTQGRSSTNGHSGSASASWQATYGTLGVGYNYDRDQHDYNWQLSGGVVGHTDGITFSQPLGDTNVLIKAPGAKGVRIENQTGVKTDWRGYAVMPYATVYRYNRVALDTNTMDNHTDVENNVSSVVPTEGALVRAAFDTRIGVRAIITARLGGRPLPFGAIVRETASGITSMVGDDGQIYLSGLPLKGELFIQWGEGKNARCIAPYALAEDSLKQAITIASATCIRPSS

SEQ ID NO: 75608 - protein, 344 aa, Salmonella typhi; identical to SEQ ID NO: 75212

SEQ ID NO: 75609 - protein, 438 aa, Salmonella typhi
MPLVIVAIGVILLLLLMIRFKMNGFIALVLVALAVGLMQGMPLDKVIGSIKAGVGGTLGSLALIMGFGAMLGKMLADCGGAQRIATTLIAKFGKKHIQWAVVLTGFTVGFALFYEVGFVLMLPLVFTIAAAANIPLLYVGVPMAAALSVTHGFLPPHPGPTAIATIFHADMGKTLLFGTILAIPTVILAGPVYARFLKGIDKPIPEGLYSAKTFTEEEMPGFGVSVWTSLVPVILMAMRAVAEMILPKGHAFLPVAEFLGDPVMATLIAVLIAMFTFGLNRGRSMDQINDTLVSSIKIIAMMLLIIGGGGAFKQVLVDSGVDKYIASMMHETNVSPLLMAWSIAAVLRIALGSATVAAITAGGIAAPLIATTGVSPELMVIAVGSGSVIFSHVNDPGFWLFKEYFNLTIGETIKSWSMLETIISVCGLIGCLLLGMVV

SEQ ID NO: 75610 - protein, 372 aa, Salmonella typhi
MALNDFHVSEPYTLGIELEMQVINPPGYDLSQDSSTLIDAVKPQLTAGEIKHDITESMLEMATGVCRDIDQVAAQLSAMQHVILQAASEHHLGICGGGTHPFQKWQRQEVCDNERYQRTLENFGYLIQQATVFGQHVHVGCANGDDAIYLLHGLSHFVPHFIALSAASPYMQGSDTRFACARLNIFSAFPDNGPMPWVSNWQEFAGLFRRLSYTTMIDSIKDLHWDIRPSPAFGTVEVRVMDTPLTLDHAINMAGLIQATAHWLLTERPFKPQEQDYLLYKFNRFQACRYGLEGVLTDVYTGDRRRLADDTLRLLDNVTPSARKLGADSAIDALRLQVKKGGNEAQYMREFIADGGSLIGLVQKHCEIWAGQ

SEQ ID NO: 75611 - protein, 1294 aa, Salmonella typhi
MTQRLPLVAAQPGIWMAEKLSDLPSAWSVAHYVELNGELDAPLLAKAVAVGMQQADTLRMRFTEENGEVWQWIDPEHTFGEPPIADLRDQPDPHLAALALMQADLRQNLRADSGKPLAFHQLIRIDDTRWYWYQRYHHLLVDGFSFPAITRQIAAIYRAWQSDAPTPESPFTPFVDVVEEYQRYRQSEAWQRDGAFWAQQRRELPPPASMSAAPLPGRSASADILRMKLSAPAGAFRQLAAHMPEIPRADLALALVTLWLGRLCGRMDYAAGFIFMRRMGSAALTATGPVLNVLPLAVNLHATEDLPTLAKRLAAQLKKMRRHQRYDAEQIVRDSGRAAGETPLFGPVLNIKVFDYHLDFPGIQAQTHTLATGPVNDLELALFPDENGGLDIELLANAQRYDDATLSRHALRLMALITQFADNPALRCGDAQMLLAEEQTQLTHLNNTAVTIPAATLSDLVAQQAQKTPEASALADAHYHFTYREMREQVVALAYALRERGVQPGDSVAVALPRSVFLTLALHGIVEAGAAWLPLDTGYPDDRLRMMLEDAQPKLLITTQAQLARFHDIPGMEYLCYSQPLPVSDATPLGLSLPHHTAYIIFTSGSTGRPKGVMVGQTAIVNRLLWMQDHYPLTADDVVAQKTPCSFDVSVWEFFWPFIAGAKLVMAEPEAHRDPLAMQRFFAQYGVTTTHFVPSMLAAFIASLTPASAGKSCASLKRVFCSGEALPTALCREWETLTNAPLHNLYGPTEAAVDVSWYPACGDELAAVDGNSIPIGYPVWNTGLRILDAHMQPVPPGVAGDLYLTGIQLAQGYLGRPDLTASRFIADPFAPGERMYRTGDVARWLDSGVVEYLGRSDDQLKIRGQRIELGEIDRVMQTLPDVEQAVAHACVFNQAAATGGDARQLVGYLVSHSGLPLDLPALQDKLRQKLPAHMVPVVLLQLASLPLSANGKLDRKALPLPDLTPRVKGRAPQSATEIAVAAAFSRLLGCEINDVESDFFALGGHSLLAMKLAAQLSQTFNRQVTPGQVMVASDVAQLSKLLDTDDDERSRNLGFGPLLPLRESDGPTLFCFHPASGFAWQFSVLSRYLSPSWSIMGIQSPRPVGPMQIATTLDEVCEHHLATLLARQPHGPYYLLGYSLGGTLAQGIAARLRARGETVAFLGLLDTWPPETQNWRGKEANGLNPDVLAEIERERAAFVAAQQGNASDALFTAIEGNYADAVRLLTTAHSAPFDGHATLFVADKTVPEDVSPEQSWSPWIASLAIYRQPCAHVDIISPSAFETIGPIISELINK

SEQ ID NO: 75612 - protein, 264 aa, Salmonella typhi
MTESVARLRGDQLTLGYGSYTVAKNLNVSIPDGHFTAIIGPNGCGKSTLLRTLSRLMTPVDGHVWLDGEQIQRYASKEVARRIGLLAQNATTPGDITVQELVARGRYPHQPLFTRWRKEDADAVASAMRATGITSLAAQSVDTLSGGQRQRAWIAMVLAQETSIMLLDEPTTWLDISHQIDLLELLSDLNREKGYTLAAVLHDLNQACRYATHLIALREGNIVAQGAPKEIVTAELIEKIYGLRCMIIDDPVAGTPLVVPLGRR

SEQ ID NO: 75613 - protein, 75 aa, Salmonella typhi; identical to SEQ ID NO: 73423

SEQ ID NO: 75614 - protein, 776 aa, Salmonella typhi
MMNDSFCRIIAGEIQANAGQVEAAVRLLDEGNTVPFIARYRKEITGGLDDTQLRNLETRLGYLRELEDRRQAILKSISEQGKLTDELAGAINATLSKTELEDLYLPYKPKRRTRGQIAIEAGLEPLADLLWNEPSHDPDVKAAKYIDGDKGVADTKAALDGARYILMERFAEDAALLAKVRDYLWKNAHLVATVVSGKEEEGAKFRDYFDHHEPIANVPSHRALAMFRGRNEGILQLSLNADPQFDEPPKESYCEQIIMDHLGLRLNNAPADSWRKGVVSWTWRIKVLMHLETELMGTVRERAEDEAINVFARNLHDLLMAAPAGLRATMGLDPGLRTGVKVAVVDGTGKLVATDTIYPHTGQAAKAATVIAALCEKYHVELVAIGNGTASRETERFYLDVQKQFPNVTAQKVIVSEAGASVYSASELAAQEFPDLDVSLRGAVSIARRLQDPLAELVKIDPKSIGVGQYQHDVSQTQLARKLDAVVEDCVNAVGVDLNTASVPLLTRVAGLTRMMAQNIVAWRDENGQFQNRQQLLKVSRLGPKAFEQCAGFLRINHGDNPLDASTVHPEAYPVVERILAATQQALKDLMGNSNELRHLKAADFTDDKFGVPTVSDIIKELEKPGRDPRPEFKTAQFADGVETMNDLLPGMILEGAVTNVTNFGAFVDIGVHQDGLVHISSLSTKFVDDPHTVVKAGDIVKVKVLEVDLQRKRIALTMRLDEQPGETAARRGGGADRAQGNRPASKAAKPRGRDAQPAGNSAMMDALAAAMGKKR

SEQ ID NO: 75615 - protein, 450 aa, Salmonella typhi
MRRMRFSPRSSFARTLLLIVTLLFVSLVTTYLVVLNFAILPSLQQFNKVLAYEVRMLMTDKLQLEDGTQLVVPPAFRREIYRELGISLYTNEAAEEAGLRWAQHYEFLSHQMAQQLGGPTEVRVEVNKSSPVVWLKTWLSPNIWVRVPLTEIHQGDFSPLFRYTLAIMLLAIGGAWLFIRIQNRPLVDLEHAALQVGKGIIPPPLREYGASEVRSVTRAFNHMAAGVKQLADDRTLLMAGVSHDLRTPLTRIRLATEMMGEEDGYLAESINKDIEECNAIIEQFIDYLRTGQEMPMEMADLNSVLGEVIAAESGYEREINTALQAGSIQVKMHPLSIKRAVANMVVNAARYGNCWIKVSSGTESHRAWFQVEDDGPGIKPEQRKHLFQPFVRGDSARSTSGTGLGLAIVQRIIDNHNGMLEIGTSERGGLSIRAWLPVPVARVQGTTKEA

SEQ ID NO: 75616 - protein, 539 aa, Salmonella typhi
MRVNNLTPQDLKAYGINDVQDIVYNPSYDTLYQEELNPGLEGYERGVLTNLGAVAVDTGIFTGRSPKDKYIVRDDTTRDTLWWSDKGKGKNDNKPLSQETWQHLKGLVTHQLSGKRLFIVDAFCGANADTRLSVRFITEVAWQAHFVKNMFIRPTDEELVGFKPDFIVMNGAKCTNPQWKEQGLNSENFVAFNLTERIQLIGGTWYGGEMKKGMFSVMNYLLPLKGIASMHCSANVGEKGDVAVFFGLSGTGKTTLSTDPKRRLIGDDEHGWDDDGVFNFEGGCYAKTIKLSKEAEPEIYHAIRRDALLENVTVREDGTVDFDDGSKTENTRVSYPIYHIDNIVKPVSKAGHATKVIFLTADAFGVLPPVSRLTANQTQYHFLSGFTAKLAGTERGVTEPTPTFSACFGAAFLTLHPTQYAEVLVKRMQAAGAQAYLVNTGWNGTGKRISIKDTRAIIDAILNGSLDNAETFRLPLFDLAIPTELPGVDTHILDPRNTYASPEQWQEKATALAKLFIENFEKYTDTPAGEALVSAGPKL

SEQ ID NO: 75617 - protein, 318 aa, Salmonella typhi
MRLSAFYRWLLLVVGLSISGISLAQDAGWPRQIQDSRGVHTLDHKPARIVSTSVTLTGSLLAIDAPVVASGATTPNNRFADDQGFMRQWSDVAKARHVARLYIGEPNAETVAAQMPDLILISATGGDSALALYDQLSAIAPTLVINYDDKSWQSLLTQLGEITGQEKQAAARIAEFEAQLTTVKQRIALPPQPVSALVYTPAAHSANLWTPESAQGKLLTQLGFTLATLPQGLQTSKSQGKRHDIIQLGGENLAAGLNGESLFLFAGDNNDVAALYANPLLAHLPAVQNKRVYALGTETFRLDYYSATLLLNRLAALF

SEQ ID NO: 75618 - protein, 537 aa, Salmonella typhi
MMRIPFTRWPDEFARRYREKGYWQDVPLTDILTRHADSDKTAVIEGERAFSYRQLNQAADNLACSLRRQGIKPGETALVQLGNVPELYITFFALLKLGVAPVLALFSHQRTELNAYAMQIAPTLVIADRQHTLFAGEDFLNRFVAEHRSARVVLLRNDDGDHSLDAAMRQAAEGFTATPSPADEVAYFQLSGGTTGTPKLIPRTHNDYYYSVRRSNEICGFNEETRFLCAIPAAHNYAMSSPGALGVFLAKGTVVLATDPGATLCFPLIEKHQINATALVPPAVSLWLQAIQEWGGNAPLASLRLLQVGGARLSATLAARIPAEIGCQLQQVFGMAEGLVNYTRLDDSPERIINTQGRPMCPDDEVWVADADGNPLPPGEIGRLMTRGPYTFRGYFNSPQHNVSAFDANGFYCSGDLISIDQDGYITVHGREKDQINRGGEKIAAEEIENLLLRHPAVIHAALVSMEDELLGEKSCAYLVVKEPLRAVQVRRFLREQGVAEFKLPDRVECVASLPLTPVGKVDKKQLRQRLASRSPL

SEQ ID NO: 75619 - protein, 569 aa, Salmonella typhi
MESVALSRTTRWGMLLTGLLQGVLCYLLMAWLVPQNSDWLFYGMPATIALSSMLLLTVVSFKQRALWGWLGLIFVVVLAMSGWLKWQVEAVEKWRLAELLWLYGLRLVLMAMLVLPWMQYQLHSQTGSARYPQFYLRLWHNVLTLFIVLVANGLFWLVLLLWSALFRLVGIRFFSTLFFETEAFIYVTIGLITALAVILARTQSRLVAAVQKLLTLIATGLLPVVSLLALLFIVTLPFTGLEAISARVSATGLLSTLTLMLLLLVAIVNEPQKRVLPYPRVLRGMISASLCVAPIYMLLAGWALWVRIQQYGWTPDRLYGALTASVLLVWSFGYLIGLLRRGRDPDEWQGKVILSVSLLTLVILLLLASPVLDVWRISVNSHMARYHSGKITADQISLYMLDHSGKPGQEALKSLRDDEAFTQNRKRNRELMTFLQRNKVPPTADDLARVVMIAPGSQKPDAAFWAFVKEQSYSDASCLEPDACVLVSQDLNGDGQPEQVLYNFIVAESQVYGLKEGKWTQKAFARLPDGFSKTQLLHAIAGHRLDSAPKAWRDIIVDGQRLDVDYYNE

SEQ ID NO: 75620 - protein, 292 aa, Salmonella typhi
MPQHDQLHRYLFENFAVRGELVTVSETLQQILDNHNYPQSVKTVLAELLVATSLLTATLKFAGDITVQLQGDGPLSLAVINGNNQQQMRGVARVQGDIPDNADLKTLVGNGYLVITITPEEGERYQGVVGLEGDTLAACLEDYFLRSEQLPTRLFIRTGDVDGKPAAGGMLLQVMPAQNAQAEDFDHLAMLTETIKSEELLTLPANDVLWRLYHEEEVTLYDPQEVEFKCTCSRERCAGALKTLPDEEVDSILAEEGEIDMHCDYCGNHYLFNAMDIAEIRNNASPADPQVH

SEQ ID NO: 75621 - protein, 133 aa, Salmonella typhi
MKEKSSVEVRLDKWLWAARFYKTRALAREMIEGGKVHYNGQRSKPSKIVELNATLTLRQGNDERTVIVKAITEQRRPASEAVALYEETAESVEKREKMAQARKLNALTMPHPARRPDKKERRDLLRFKHGDSE

SEQ ID NO: 75622 - protein, 858 aa, Salmonella typhi
MTLNGKSPVKFVKYLLILAVCCILLGAGSIYGLYRYIEPQLPDVATLKDVRLQIPMQVYSADGELIAQYGEKRRIPVTLDQIPPEMINAFIATEDSRFYEHHGIDPVGIFRAASVALFSGHASQGASTITQQLARNFFLSPERTLMRKIKEAFLAIRIEQLLNKNEILELYLNKIYLGYRAYGVGAAAQVYFGKTVDQLSLSEMAVIAGLPKAPSTFNPLYSMDRAVARRNVVLSRMLSEGYITQAQYDQARSEPIDANYHAPEIAFSAPYLSEMVRQEMYNRYGESAYEDGYRIYTTITRKVQQAAQQAVRNNVLDYDMRHGYSGPANVLWKVGETAWDSKKITDTLKALPTYGPLLPAVVTSANPQEATAALADGTSVSLHMEGMRWARPYRSDTQQGPTPRKVTDVVQTGQQIWVRQVDNDWWLAQVPEVNSALVSLNPQTGAVLALVGGFDFNQSKFNRATQALRQVGSNIKPFLYTAAMDKGLTLASMLNDVPISRWDAGAGSDWRPKNSPPQYAGPIRLRQGLGQSKNVVMVRAMRAMGVDYAAEYLQRFGFPAQNIVHTESLALGSASFTPMQVARGYAVMANGGFLIDPYFISKIENDQGGVIFEAKPKIACTECDIPVIYGNTQKSDVLENTNVEEVAVSQEQQNSAVPMPELEQANQALVAQNGTQEYAPHVINTPLAFLIKSALNTNIFGEPGWMGTGWRAARDLKRRDIGGKTGTTNSSKDAWFSGYGPGVVTSVWIGFDDHRRDLGRTTASGAIKDQISGYEGGAKSAQPAWDAYMKAVLEGVPEQPLTPPPGIVTVNIDRSTGQLASGGNSREEYFIEGTQPTQQAVHEVGTTIIDNGETHELF

SEQ ID NO: 75623 - protein, 259 aa, Salmonella typhi
MAFKTWQIGLHIQQHEALAIAVIRGASGWSLQRWWRLPLMNASTAEGTIPDPQSLAHVLRPWSRELPLRHRIYLSFPANRTLQRAFPHPPMRLREREQVAWLSQTMARELDMDPDLLRFDFQDDALSPAFNVTAVQSKEISELLTLAQTLNVRIAAVTPDACALQRLLPFIPSGRQCLVWRDESQWLWATRYAWGRKSAREAMTLHDLAATLSVVPEHISLCAEGEFDPWRAVTVRQPPVPPDGYRFAIALGLAMGEIR

SEQ ID NO: 75624 - protein, 300 aa, Salmonella typhi
MANLYDLKKFDLNLLVIFECIYQHLSISKAAETLYITPSAVSQSLQRLRTQFNDPLFIRSGKGITPTVTGINLHYHLENNLNSLEQTINIMNQSSLKKKFIIYSPQLLITQYAMKLVKYIRKDPQVEIEHHDILTTDELPEDLLAYRKADVVVSMAPLNNRSIVCTHFNRLECILVCSENHPRLGDTATIDEILQESFTQLVSRATGMKEYHSLIDDVLGERIIGLRSKSVMTIANSISSTELIGFLPQTFVDYYSSSIKLKKVATPFTIAPIQFYLMYNRASLNNSGFAELIEYITKKR

SEQ ID NO: 75625 - protein, 187 aa, Salmonella typhi; identical to SEQ ID NO: 73306

SEQ ID NO: 75626 - protein, 334 aa, Salmonella typhi
MTKPIVFSGAQPSGELTIGNYMGALRQWVNMQDDYHCIYCIVDQHAITVRQDAQQLRKATLDTLALYLACGIDPEKSTIFVQSHVPEHAQLGWALNCYTYFGELSRMTQFKDKSARYAENINAGLFDYPVLMAADILLYQTNLVPVGEDQKQHLELSRDIAQRFNGLYGDIFKVPEPFIPKSGARVMSLLEPTKKMSKSDDNRNNVIGLLEDPKSVVKKIKRAVTDSDEPPVVRYDVKEKAGVSNLLDILSAVTGQSIPELEKQFEGKMYGHLKGEVAEAVSGMLSELQERYHRFRNDEAFLQKVMKDGAEKASARAAETLKAVYEAIGFVAKP

SEQ ID NO: 75627 - protein, 56 aa, Salmonella typhi; identical to SEQ ID NO: 75176

SEQ ID NO: 75628 - protein, 509 aa, Salmonella typhi
MTQKNESQRQDRVVAWSRHAESELSAYQSAAKLDLQAQKPRDHKLCASLEEAIRRSGLRDGMTLSFHHAFRGGDLTINLVMETIAKMGFKNLTLASSSLSDCHAPLVEHIRNGVVSRIYTSGLRGPLAEEISRGLLAEPVQIHSHGGRVHLVQSGELNIDVAFLGVPSCDEFGNANGYTGKACCGSLGYAMVDADSAKQVVMLTEQLLPYPHNPASIAQDQVDLIVQIEEVGDANKIGAGATRMTTNPRELLIARSAAEVIAHSGYFNEGFSLQTGTGGASLAVTRFLEDKMRSRNIVANFALGGITATMVNLHEKGLIRKLLDVQSFDRNAAQSLARNPNHIEISANQYANWGSKGASVDRLDVVVLSALEVDTHFNVNVLTGSDGVLRGASGGHCDTAVAAALSIIVAPLVRGRIPTLVDNVTTCVTPGSSVDILVTDHGIAVNPARPELAERLKAAGMKVVSIEWLRERAQLLTGQPRPIEFTDRVIAVVRYRDGSVIDVVHQVKE

SEQ ID NO: 75629 - protein, 457 aa, Salmonella typhi
MDHLPIFCQLRDRDCLIVGGGDVAERKARLLLEAGARLTVNALTFIPQFTVWVNEGMLTLVEGPFDETLLDSCWLAIAATDDDTVNQRVSEAAESRRIFCNVVDAPKAASFIMPSIIDRSPLMVAVSSGGTSPVLARLLREKLESLLPQHLGQVARYAGQLRARVKKQFATMGERRRFWEKFFVNDRLAQSLANADEKAVNATTEHLFSEPLDHRGEVVLVGAGPGDAGLLTLKGLQQIQQADIVVYDRLVSDDIMNLVRRDADRVFVGKRAGYHCVPQEEINQILLREAQKGKRVVRLKGGDPFIFGRGGEELETLCHAGIPFSVVPGITAASGCSAYSGIPLTHRDYAQSVRLVTGHLKTGGELDWENLAAEKQTLVFYMGLNQAATIQEKLIAFGMEANMPVALVENGTSVKQRVVHGVLTQLGELAQQVESPALIIVGRVVALRDKLNWFSNH

SEQ ID NO: 75630 - protein, 847 aa, Salmonella typhi
MSKVRLAIIGNGMVGHRFIEDLLDKSDASLFDITVFCEEPRKAYDRVHLSSYFSHHTAEELSLVREGFYEKHGVKVLVGERAITINRQEKVIHSSAGRTVYYDKLIMATGSYPWIPPIKGSETQDCFVYRTIEDLNAIEACARRSKRGAVVGGGLLGLEAAGALKNLGVETHVIEFAPMLMAEQLDQMGGEQLRRKIESMGVRVHTSKNTQEIVQQGNEARKTMRFADGSELEVDFIVFSTGIRPRDKLATQCGLAVAQRGGIVINDTCQTSDPDIYAIGECASWNNRVYGLVAPGYKMAQVAVDHILGSENAFEGADLSAKLKLLGVDVGGIGDAHGRTPGARSYVYLDESKEVYKRLIVSEDNKTLLGAVLVGDTSDYGNLLQLVLNAIELPENPDSLILPSHASSGKPAIGVDKLPDSAQICSCFDVTKGDLIAAINKGCHTVAALKAETKAGTGCGGCIPLVTQVLNAELAKQGIEVNNNLCEHFAYSRQELFHLIRVEGIKTFEELLTKHGKGYGCEVCKPTVGSLLASCWNEYILKPQHTPLQDTNDNFLANIQKDGTYSVIPRSAGGEITPEGLVAVGRIAREFNLYTKITGSQRIGLFGAQKDDLPEIWRQLIEAGFETGHAYAKALRMAKTCVGSTWCRYGVGDSVGFGVELENRYKGIRTPHKMKFGVSGCTRECAEAQGKDVGIIATEKGWNLYVCGNGGMKPRHADLLAADLDRDTLIKYLDRFMMFYIRTADKLTRTAPWLDNLEGGIEYLKSVIIDDKLGLNEHLEEEMARLRAAVVCEWTETVNTPAAQVRFKHFINSDKRDPNVQVVPEREQHRPATPYERIPVTLVEENA

SEQ ID NO: 75631 - protein, 393 aa, Salmonella typhi
MTNSNRIKLTWISFLSYALTGALVIVTGMVMGNIADYFQLPVSSMSNTFTFLNAGILISIFLNAWLMEIVPLKTQLRFGFILMVLAVAGLMFSHSLALFSAAMFVLGLVSGITMSIGTFLITQLYEGRQRGSRLLFTDSFFSMAGMIFPMVAAFLLARSIEWYWVYACIGLVYLAIFILTFGCEFPALGKHAQHSQAPVVKEKWGIGVLFLAVAALCYILGQLGFISWVPEYAKGLGMSLNDAGALVSDFWMSYMFGMWAFSFILRFFDLQRILTVLAGMAAILMYLFITGTQAHMPWFILTLGFFSSAIYTSIITLGSQQTKVASPKLVNFILTCGTIGTMLTFVVTGPIVAHSGPQAALLTANGLYAVVFVMCFALGFVSRHRQHSSPAAH

SEQ ID NO: 75632 - protein, 200 aa, Salmonella typhi
MSDKFGEGRDPYLYPGLNVMRNRLGIHQAQRLAQAAYEMTALRAATIELGPLVRGLPHLCAIHRQLYQDIFDWAGQLREVDIYQGDTRFCHFAYIEKEGNALMQDLEEEGYLVGLTHEKFVERLAHYYCEINVLHPFRLGSGLAQRIFFEQLALHAGYALSWQGIAVETWNQANQSGAMGDLSALRAIFQKAISEARETE

SEQ ID NO: 75633 - protein, 103 aa, Salmonella typhi
MSKTLLQIHFNFSGPFGEEMTQQLVGLAESINEEPGFIWKIWTESEKNQQAGGIYLFESEETAQAYIKKHTARLKNLGVDEVTFTLFGVNDALTKINHGNLCR

SEQ ID NO: 75634 - protein, 321 aa, Salmonella typhi
MSKPIVMERGVKYRDADKMALIPVKNVVTERDALLRKPEWMKIKLPADSTRIQGIKAAMRKNGLHSVCEEASCPNLAECFNHGTATFMILGAICTRRCPFCDVAHGRPVAPDAEEPQKLAQTIADMALRYVVITSVDRDDLRDGGAQHFADCITAIRAKSPEIKIETLVPDFRGRMDRALDILNATPPDVFNHNLENVPRIYRQVRPGADYNWSLKLLERFKEAHPEIPTKSGLMVGLGETNAEIIEVMRDLRRHGVTMLTLGQYLQPSRHHLPVQRYVSPEEFDEMKAEALAMGFTHAACGPCVRSSYHADLQAKGMEVK

SEQ ID NO: 75635 - protein, 317 aa, Salmonella typhi
MSDNNQAERQPADQHLQDKPQIFRTLRNIDLNLLTIFEAVYVHKGIVNAAKILNLTPSAISQSIQKLRTIFPDPLFIRKGQGVTPTTYATHLHEYISQGLESILGALDLTGSYDKQRTITIGTTPSVGALVMPIIYQAIRPRYPQLLLRNIPVDDAESQLSQFQTDLIINTHSYNNRSIQHHVLFSDTLEIVCRQHHPCLANAITEERLNSADHTFLMLEGQHLSLLRQRLQETFPDQQISFSSYNIFTIASLIASSDLLGLMPTRFYDLFSRCWPLERLPYAPVNSEQVEFSLHYNKLSLRDPVLENVIDIIREAF

SEQ ID NO: 75636 - protein, 155 aa, Salmonella typhi
MKLQLVAVGTKMPDWVQTGFTEYLRRFPKDMPFELIEIPAGKRGKNADIKRILDKEGEQMLAAAGKNRIVTLDIPGKPWDTPQLANELERWKQDGRDVSLLIGGPEGLSPACKAAAEQSWSLSALTLPHPLVRVLVAESLYRAWSITTNHPYHRE

SEQ ID NO: 75637 - protein, 860 aa, Salmonella typhi
MQEQYRPEEIESKVQLHWDEKRTFEVTEDESKEKYYCLSMLPYPSGRLHMGHVRNYTIGDVVARYQHMLGKNVLQPIGWDAFGLPAEGAAVKNNTAPAPWTYDNIAYMKNQLKTLGFGYDWSREIATCTPEYYRWEQKFFTELYKKGLVYKKTSAVNWCPNDQTVLANEQVIDGCCWRCDTKVERKEIPQWFIKITAYADELLRDLDKLDHWPDTVKTMQRNWIGRSEGVEITFDVKGYDNTLTVYTTRPDTFMGATYLAVAAGHPLAQKAAANNAELAAFIDECRNTKVAEAEMATMEKKGVDTGYKAIHPLTGEEIPVWAANFVLMEYGTGAVMAVPGHDQRDYEFASKYGLTIKPVILAADGSEPDLSEQALTEKGVLFNSGEFDGLAFEAAFNAIADKLAEKGVGERKVNYRLRDWGVSRQRYWGAPIPMVTLEDGTVLPTPEDQLPVILPEDVVMDGITSPIKADPEWAKTTVNGMPALRETDTFDTFMESSWYYARYTCPQYQEGMLDSKAANYWLPVDIYIGGIEHAIMHLLYFRFFHKLMRDAGMVTSDEPAKQLLCQGMVLADAFYYVGENGERNWVSPVDAIVERDEKGRIVKAKDAAGHELVYTGMSKMSKSKNNGIDPQVMVERYGADTVRLFMMFASPADMTLEWQESGVEGANRFIKRVWKLVYEHTAKGPVAALNVDALSEDQKALRRDVHKTIAKVTDDIGRRQTFNTAIAAIMELMNKLAKAPQEGEQDRALLQEALQAVVRMLNPFTPHVCFTLWQELGGEGDIDNAPWPVADEQAMVENTTLVVVQVNGKVRGKITVAVDATEEQVRERAGQEHLVAKYLDGVTVRKVIYVPGKLLNLVVG

SEQ ID NO: 75638 - protein, 89 aa, Salmonella typhi
MSLSTEATAKIVSEFGRDANDTGSTDVQVALLTAQINHLQGHFAEHKKDHHSRRGLLRMVSQRRKLLDYLKRKDVARYTALIERLGLRR

SEQ ID NO: 75639 - protein, 314 aa, Salmonella typhi
MSRPRRRGRDIHGVLLLDKPQGMSSNDVLQKVKRIYNANRAGHTGALDPLATGMLPICLGEATKFSQYLLDSDKRYRVIARLGQRTDTSDADGQIVQERPVTFSAEQLASALETFRGDIEQIPSMYSALKYQGRKLYEYARQGIEVPREARPITVYELLFIRHEGNELELEVHCSKGTYIRTIIDDLGEKLGCGAHVTYLRRLTVSKYPVDRMVTLEHLQTLVAQAEQQGVPAAQLLDPLLMPMDSPASDYPVVNLPLTSSVYFKNGNPVRTTGAPLKGLVRVTEGEDDKFIGMGEIDDEGRVAPRRLVVEYPA

SEQ ID NO: 75640 - protein, 892 aa, Salmonella typhi
MTDLTLKALAAERQVSVDRLVQQFADAGIRKSADDSVSAQEKQTLLAHLNREAVSGPDKLTLQRKTRSTLNIPGTGGKSKSVQIEVRKKRTFVKRDPQEAERLAAEEQAQREAEEQARREAEEQAKREAQQKAEREAAEQAKREAAEKAKREAAEKDKVSNQQTDDMTKTAQAEKARRENEAAELKRKAEEEARRKLEEEARRVAEEARRMAEENKWTATPEPVEDTSDYHVTTSQHARQAEDENDREVEGGRGRGRNAKAARPAKKGKHAESKADREEARAAVRGGKGGKRKGSSLQQGFQKPAQAVNRDVVIGETITVGELANKMAVKGSQVIKAMMKLGAMATINQVIDQETAQLVAEEMGHKVILRRENELEEAVMSDRDTGAAAEPRAPVVTIMGHVDHGKTSLLDYIRSTKVASGEAGGITQHIGAYHVETDNGMITFLDTPGHAAFTSMRARGAQATDIVVLVVAADDGVMPQTIEAIQHAKAAGVPVVVAVNKIDKPEADPDRVKNELSQYGILPEEWGGESQFVHVSAKAGTGIDELLDAILLQAEVLELKAVRKGMASGAVIESFLDKGRGPVATVLVREGTLHKGDIVLCGFEYGRVRAMRNELGQEVLEAGPSIPVEILGLSGVPAAGDEVTVVRDEKKAREVALYRQGKFREVKLARQQKSKLENMFVNMTEGEVHEVNIVLKADVQGSVEAISDSLLKLSTDEVKVKIIGSGVGGITETDATLAAASNAILVGFNVRADASARKVIESESLDLRYYSVIYNLIDEVKAAMSGMLSPELKQQIIGLAEVRDVFKSPKFGAIAGCMVTEGTIKRHNPIRVLRDNVVIYEGELESLRRFKDDVNEVRNGMECGIGVKNYNDVRVGDMIEVFEIIEIQRTIA

SEQ ID NO: 75641 - protein, 500 aa, Salmonella typhi
MNKEILAVVEAVSNEKALPREKIFEALESALATATKKKYEQEIDVRVEIDRKSGDFDTFRRWLIVEEVTMPTKEITLEAARFEDESLNVGDYVEDQIESVTFDRITTQTAKQVIVQKVREAERAMVVDQFRDQEGEIVTGVVKKVNRDNISLEIKSEGMAGNAEAVILREDMLPRENFRPGDRIRGVLYAVRPEARGAQLFVTRSKPEMLIELFRIEVPEIGEEVIEIKAAARDPGSRAKIAVKTNDKRIDPVGACVGMRGARVQAVSTELGGERIDIVLWDDNPAQFVINAMAPADVASIVVDEDKHTMDIAVEAGNLAQAIGRNGQNVHLASQLSGWELNVMTVDDLQAKHQAEAHAAIEIFTKYLDIDEEFATVLVEEGFSTLEELAYVPMKELLEIDGLDEPTVEALRERAKNALATLAQDQEASLGDNKPADDLLNLEGLDRDMAFKLAARGVCTLEDLADQGIDDLADIEGLTDEKAGELIMAARNICWFGDEA

SEQ ID NO: 75642 - protein, 445 aa, Salmonella typhi
MSNRKYFGTDGIRGRVGNAPITPDFVLKLGWAAGKVLARHGSRKIIIGKDTRISGYMLESALEAGLAAAGLSASFTGPMPTPAVAYLTRTFRAEAGIVISASHNPFYDNGIKFFSIDGTKLPDDVEEAIEAEMEKEITCVDSAELGKASRIVDAAGRYIEFCKGTFPNELSLNGLKVVVDCANGATYHIAPNVLRELGATVIAIGCEPNGVNINEEVGATDVRALQARVLAEKADLGIALDGDGDRVIMVDHEGNKVDGDQIMYIIAREGLRQGQLRGGAVGTLMSNMGLELALKQLGIPFARAKVGDRYVLEKLQEKGWRIGAENSGHVILLDKTTTGDGIVAGLQVLAAMVRNHMSLHDLCSGMKMFPQILVNVRYTAGSGDPLENEAVKAVTADVEATLGNRGRVLLRKSGTEPLIRVMVEGEDEAQVTAFAHRIADAVKAV

SEQ ID NO: 75643 - protein, 282 aa, Salmonella typhi
MKLFAQGATLDLTHPHVMGILNVTPDSFSDGGAHNTLIEAVKHANLMVNTGATIIDVGGESTRPGAAEVSVEEELDRVIPVLEAIAQRFEVWISVDTSKPEVIREAARAGAHIINDVRSLSEPGALEAAAETGLPVSLMHMQGNPKTMQEAPKYDDVFAEVNRYFIEQIARCEKAGIAKEKLLLDPGFGFGKNLSHNYTLLARLGEFHHFNLPLLVGMSRKTMVGQLLNVGPSDRLNGSLACAVIAAMQGAQIIRVHDVKETVEAMRVVEATLSAKGNKRYE

SEQ ID NO: 75644 - protein, 644 aa, Salmonella typhi
MAKNLILWLVIAVVLMSVFQSFGPSESNGRKVDYSTFLQEVNQDQVREARINGREINVTKKDSNRYTTYIPINDPKLLDNLLTKNVKVVGEPPEEPSLLASIFISWFPMLLLIGVWIFFMRQMQGGGGKGAMSFGKSKARMLTEDQIKTTFADVAGCDEAKEEVAELVEYLREPSRFQKLGGKIPKGVLMVGPPGTGKTLLAKAIAGEAKVPFFTISGSDFVEMFVGVGASRVRDMFEQAKKAAPCIIFIDEIDAVGRQRGAGLGGGHDEREQTLNQMLVEMDGFEGNEGIIVIAATNRPDVLDPALLRPGRFDRQVVVGLPDVRGREQILKVHMRRVPLATDIDAAIIARGTPGFSGADLANLVNEAALFAARGNKRVVSMVEFEKAKDKIMMGAERRSMVMTEAQKESTAYHEAGHAIIGRLVPEHDPVHKVTIIPRGRALGVTFFLPEGDAISASRQKLESQISTLYGGRLAEEIIYGVEHVSTGASNDIKVATNLARNMVTQWGFSEKLGPLLYAEEEGEVFLGRSVAKAKHMSDETARIIDQEVKALIERNYNRARQILTDNMDILHAMKDALMKYETIDAPQIDDLMARREVRPPAGWEDPNGTNNSDSNGTPQAPRPVDEPRTPNPGNTMSEQLGDK

SEQ ID NO: 75645 - protein, 477 aa, Salmonella typhi
MRFSRFIIGLTTSIAFSVQAANIDEYIKQLPAGANLALMVQKIGAPAPAIDYHSQQMALPASTQKVITALAALIQLGPDFRFTTTLETKGNVDNGILKGDLIARFGGDPTLRRQDIRNMVATLKKSGVTQIDGNVLIDTSIFASHDKAPGWPWNDLTQCFSAPPAAAIVDRNCFSVSLYSAQKPNDLAFIRVASYYPVTMFSQVRTLPRGSADAQYCELDVVPGDLNRYTLTGCLPQRADPLPLAFAIQDGASYAGAILKQELKEAGITYRGTLLRQTQVNEPGTIVASKQSAPLHDLLKIMLKKSDNMIADTVFRMIGHVRFNVPGTWRAGSDAVRQILRQQAGIDIGNTIIADGSGLSRHNLIAPATMMQVLQYIAQHDNELNFISMLPLAGYDGSLQYRAGLHQAGVDGKVSAKTGSLQGVYNLAGFITTASGQRMAFVQYLSGYAVPPADQRNRRIPLVRFESRLYKDIYQNN

SEQ ID NO: 75646 - protein, 390 aa, Salmonella typhi
MKFVDEASILVVAGDGGNGCVSFRREKYIPKGGPDGGDGGDGGDVWMEADENLNTLIDYRFEKSFRAERGQNGASRDCTGKRGKDVTIKVPVGTRVIDQGTGETMGDMTKHGQRLLVAKGGWHGLGNTRFKSSVNRTPRQKTNGTPGDKRDLLLELMLLADVGMLGMPNAGKSTFIRAVSAAKPKVADYPFTTLVPSLGVVRMDSEKSFVVADIPGLIEGAAEGAGLGIRFLKHLERCRVLLHLIDIDPIDGSDPVENARIIIGELEKYSQDLAAKPRWLVFNKIDLMDKSEAEEKAKAIAEALGWEGKYYLISAASQLGVKDLCWDVMTFIIENPIAQAEEAKQPEKVEFMWDDYHRQQLAEVEEDADDDWDDDWDEDDEEGVEFIYKR

SEQ ID NO: 75647 - protein, 85 aa, Salmonella typhi; identical to SEQ ID NO: 72700

SEQ ID NO: 75648 - protein, 103 aa, Salmonella typhi
MYAVFQSGGKQHRVSEGQTVRLEKLDIATGETIEFAEVLMIANGEEVKIGVPFVDGGVIKAEVVAHGRGEKVKIVKFRRRKHYRKQQGHRQWFTDVKITGISA

SEQ ID NO: 75649 - protein, 323 aa, Salmonella typhi; identical to SEQ ID NO: 75052

SEQ ID NO: 75650 - protein, 419 aa, Salmonella typhi
MDKFRVQGPTTLQGEVTISGAKNAALPILFAALLAEEPVEIQNVPKLKDVDTSMKLLSQLGAKVERNGSVHIDASQVNVFCAPYDLVKTMRASIWALGPLVARFGQGQVSLPGGCTIGARPVDLHITGLEQLGATIKLEEGYVKASVEGRLKGAHIVMDKVSVGATVTIMCAATLAEGTTIIENAAREPEIVDTANFLVTLGAKIAGQGTDRITIEGVERLGGGVYRVLPDRIETGTFLVAAAISRGKILCRNAQPDTLDAVLAKLRDAGADIEVGEDWISLDMHGKRPKAVNVRTAPHPAFPTDMQAQFTLLNLVAEGTGFITETVFENRFMHVPELSRMGARAEIESNTVICHGVETLSGAQVMATDLRASASLVLAGCIAEGTTIVDRIYHIDRGYERIEDKLRALGANIERVKGE

SEQ ID NO: 75651 - protein, 299 aa, Salmonella typhi
MSQVQSGILPEHCRAAIWIEANVKGDLDALRAASRTFADKLATFEVKFPDAHLGAVVAFGNNTWRALSGGVGAEELKDFIPYGKGLAPATQYDVLIHILSLRHDVNFSVAQAAMEAFGDCIDVKEEVHGFRWVEERDLSGFVDGTENPAGEETRREVAVIKDGVDAGGSYVFVQRWEHNLKQLNRMSIHDQEMMIGRTKEANEEIDGDARPATSHLSRVDLKEDGKGLKIVRQSLPYGTASGTHGLYFCAYCARLHNIEQQLLSMFGDTDGKRDAMLRFTKPVTGGYYFAPSLDRLLAL

SEQ ID NO: 75652 - protein, 284 aa, Salmonella typhi
MVLMIVSGRSGSGKSVALRALEDMGFYCVDNLPVVLLPDLARTLADRQISAAVSIDVRNIPESPEIFEQAMNNLPGAFSPQLLFLDADRNTLIRRYSDTRRLHPLSSKNLSLESAIDKESDLLEPLRSRADLIVDTSEMSVHELAEMLRTRLLGKRERELTMVFESFGFKHGIPIDADYVFDVRFLPNPHWDPKLRPMTGLDKPVAAFLDRHTEVHNFIYQTRSYLELWLPMLETNNRSYLTVAIGCTGGKHRSVYIAEQLADYFRSRGKNVQSRHRTLEKRKT

SEQ ID NO: 75653 - protein, 242 aa, Salmonella typhi
MSKRRIAPLTFLRRLLLRILAALAVFWGGGIALFSVVPVPFSAVMAERQISAWLGGEFGYVAHSDWVSMADISPWMGLAVIAAEDQKFPEHWGFDVPAIEKALAHNERNESRIRGASTLSQQTAKNLFLWDGRSWVRKGLEAGLTLGIETVWSKKRILTVYLNIAEFGDGIFGVEAAAQRYFHKPASRLSVSEAALLAAVLPNPLRYKANAPSGYVRSRQAWIMRQMRQLGGESFMTRNQLN

SEQ ID NO: 75654 - protein, 1486 aa, Salmonella typhi
MLYDKSLEKDNCGFGLIAHIEGEPSHKVVRTAIHALARMQHRGAILADGKTGDGCGLLLQKPDRFFRIVAEERGWRLAKNYAVGMIFLNKDPELAAASRHIVEEELQQETLSIVGWRDVPTNEGVLGEIALSSLPRIEQIFVNAPAGWRPRDMERRLFIARRRIEKRLQDDKDFYVCSLSNLVNIYKGLCMPADLPRFYLDLADLRLESAICLFHQRFSTNTVPRWPLAQPFRYLAHNGEINTITGNRQWARARTYKFQTPLIPDLQSAAPFVNETGSDSSSLDNMLELLLAGGMDIIRAMRLLVPPAWQNNPDMDQDLRAFFDFNSMHMEPWDGPAGIVMSDGRFAACNLDRNGLRPARYVITKDKLITCASEVGIWDYQPDEVVEKGRVGPGELMVIDTRGGRILHSAETDDDLKSRHPYKAWMEKNVRRLVPFEELPDEEVGSRELDDDLLASYQKQFNYSAEELDSVIRVLGENGQEAVGSMGDDTPFAVLSSQPRIIYDYFRQQFAQVTNPPIDPLREAHVMSLATSIGREMNVFCEAEGQAHRLSFKSPILLYSDFKQLTTMSEHHYRADWLDITFDVTETTLDATVKALCDKAEQMVRNGTVLLVLSDRNIGKNRLPVPAPMAVGAVQTRLVDQSLRCDANIIVETGSARDPHHFAVLLGFGATAIYPYLAYETLGRLIDTQAIAKNYRTVMQNYRNGINKGLYKIMSKMGISTIASYRCSKLFEAVGLHDDVVNLCFQGVVSRIGGASFDDFQQDLLNLSKRAWLARKPISPGGLLKYVHGGEYHAYNPDVVRTLQQAVQSGEYSDYQEYAKLVNERPAATLRDLLAIHPDGEAVTIDEVEPASELFKRFDTAAMSIGALSPEAHEALAEAMNSLGGNSNSGEGGEDPARYGTNKVSRIKQVASGRFGVTPAYLVNADVIQIKVAQGAKPGEGGQLPGDKVTPYIAKLRYSVPGVTLISPPPHHDIYSIEDLAQLIFDLKQVNPKAMISVKLVSEPGVGTIATGVAKAYADLITIAGYDGGTGASPLSSVKYAGCPWELGLVETQQALVANGLRHKIRLQVDGGLKTGVDIIKAAILGAESFGFGTGPMVALGCKYLRICHLNNCATGVATQDEKLRKNHYHGLPFKVTNYFEFIAREVRELMASLGVTRLVDLIGRTDLLKELEGFTAKQQKLALSRLLETAEPHPGKALYCTENNPPFDNGVLNAQLLQQAKPFVDARQSKTFWFDIRNTDRSVGASLSGYIAQTHGDQGLASDPIKAHFSGTAGQSFGVWNAGGVELYLTGDANDYVGKGMAGGLIAIRPPVGSAFLSHKASIIGNTCLYGATGGRLYAAGRAGERFGVRNSGAITVVEGIGDNGCEYMTGGIVCVLGKTGVNFGAGMTGGFAYVLDEDGEFRKRVNPELVEVLDVDSLAIHEEHLRGLITEHVQHTGSQRGEEILSRWSSFSTQFALVKPKSSDVKALLGHRSRSAAELRVQAQ

SEQ ID NO: 75655 - protein, 472 aa, Salmonella typhi
MSQNVYQFIDLQRVDPPKKPLKLRKIEFVEIYEPFSEGQAKAQADRCLSCGNPYCEWKCPVHNYIPNWLKLANEGRIFEAAELSHQTNTLPEVCGRVCPQDRLCEGSCTLHDEFGAVTIGNIERYINDKAFEMGWRPDMTGVRQTDKRVAIIGAGPAGLACADVLTRNGVKAVVFDRHPEIGGLLTFGIPAFKLEKEVMTRRREIFTGMGIEFKLNTEVGRDVQLEDLLKDYDAVFLGVGTYQSMRGGLENEDADGVFDALPFLIANTKQIMGFGETSDEPYVSMEGKRVVVLGGGDTAMDCVRTSIRQGATHVTCAYRRDEENMPGSRREVKNAREEGVEFQFNVQPLGIEVNANGKVSGVKMVRTEMGEPDAKGRRRAEIVAGSEHVVPADAVVMAFGFRPHSMEWLAKHSVELDSQGRIIAPERSDNAFQTSNPKIFAGGDIVRGSDLVVTAIAEGRKAADGIMNYLEV

SEQ ID NO: 75656 - protein, 453 aa, Salmonella typhi
MKLKTTLFGNVYQFKDVKEVLAKANELRSGDVLAGVAAASSQERVAAKQVLSEMTVADIRNNPVIAYEEDCVTRLIQDDVNETAYNRIKNWSISELREYVLSDETSVDDIAFTRKGLTSEVVAAVAKICSNADLIYGGKKMPVIKKANTTIGIPGTFSCRLQPNDTRDDVQSIAAQIYEGLSFGAGDAVIGVNPVTDDVENLTRVLDTVYGVIDKFNIPTQGCVLAHVTTQIEAIRRGAPGGLIFQSICGSEKGLKEFGVELAMLDEARAVGAEFNRIAGENCLYFETGQGSALSAGANFGADQVTMEARNYGLARYYDPFLVNTVVGFIGPEYLYNDRQIIRAGLEDHFMGKLSGISMGCDCCYTNHADADQNLNENLMILLATAGCNYIMGMPLGDDIMLNYQTTAFHDTATVRQLLNLRPSPEFERWLETMGIMANGRLTKRAGDPSLFF

SEQ ID NO: 75657 - protein, 408 aa, Salmonella typhi
MGINEIIMYIMMFFMLIAAVDRILSQFGGSARFLGKFGKSIEESGGQFEEGFMAMGALGLAMVGMTALAPVLAHVLGPVIIPVYEMLGANPSMFAGTLLACDMGGFFLAKELAGGDVAAWLYSGLILGSMMGPTIVFSIPVALGIIEPSDRRYLALGVLAGIVTIPIGCIAGGLIAMYSGVQINGQPVEFTFALILMNMIPVLIVAVLVALGLKFIPEKMINGFQIFAKFLVALITIGLAAAVVKFLLGWELIPGLDPIFMAPGDKPGEVMRAIEVIGSISCVLLGAYPMVLLLTRWFEKPLMNVGKLLNVNNIAAAGMVATLANNIPMFGMMKQMDTRGKVINCAFAVSAAFALVDHLGFAAANMNAMIFPMIVGKLIGGVTAIGVAMMLVPKDDAAQVKTEAEAQS

SEQ ID NO: 75658 - protein, 212 aa, Salmonella typhi
MAVAANKRSVMTLFSGPTDIYSHQVRIVLAEKGVSFEIEHVEKDNPPQDLIDLNPNQSVPTLVDRELTLWESRIIMEYLDERFPHPPLMPVYPVARGESRLYMHRIEKDWYTLMNVIVNGSASEVDSARKQLREELLAIAPVFGQKPYFLSDEFSLVDCYLAPLLWRLPQLGIEFSGAGAKELKGYMTRVFERDSFLASLTEAEREMRLGRG

SEQ ID NO: 75659 - protein, 130 aa, Salmonella typhi; identical to SEQ ID NO: 72819

SEQ ID NO: 75660 - protein, 60 aa, Salmonella typhi
MGKATYTVTVTNNSNGVSVDYETEAPMTLLVPEVTAEVVKDLVNTVRSYDTENEHDVCGW

SEQ ID NO: 75661 - protein, 120 aa, Salmonella typhi; identical to SEQ ID NO: 73466

SEQ ID NO: 75662 - protein, 142 aa, Salmonella typhi [sequence omitted]

SEQ ID NO: 75663 - protein, 134 aa, Salmonella typhi
MFMTWEYALIGLVVGIIIGAVAMRFGNRKLRQQQALQYELEKNKAELEEYREELVSHFARSAELLDTMAHDYRQLYQYMAKSSSSLLPEMSAESNPFRNRLAESEASNDQAPVQMPRDYSEGASGLLRSGAKRD

SEQ ID NO: 75664 - protein, 316 aa, Salmonella typhi
MNQLDGIKQFTTVVADSGDIESIRHYQPQDATTNPSLLLKAAGLEQYGHLIEDAIAWGKKHGGTQEQQVAAASDKLAVNFGAEILKSIPGRVSTEVDARLSFDKEKSIEKARHLVDLYQQQDVDKSRILIKLAATWEGIRAAEQLEKEGINCNLTLLFSFAQARACAEAGVYLISPFVGRIYDWYQARSPLEPYVVEEDPGVKSVRNIYDYFKQHRYETIVMGASFRRTEQILALTGCDRLTISPNLLKELKEKEEPVIRKLVPSSQMFHRPTPMTEAEFRWEHNQDAMAVEKLSEGIRLFAVDQRKLEDLLAAKL

SEQ ID NO: 75665 - protein, 455 aa, Salmonella typhi
MKKHTQLLSALALSVGLTLSAPFPALASIPGQVPGQATLPSLAPMLEKVLPAVVSVKVEGTATQSQKVPEEFKKFFGEDLPDQPSQPFEGLGSGVIIDAAKGYVLTNNHVINQAQKISIQLNDGREFDAKLIGGDDQSDIALLQIQNPSKLTQIAIADSDKLRVGDFAVAVGNPFGLGQTATSGIISALGRSGLNLEGLENFIQTDASINRGNSGGALLNLNGELIGINTAILAPGGGSIGIGFAIPSNMAQTLAQQLIQFGEIKRGLLGIKGTEMTADIAKAFKLNVQRGAFVSEVLPNSGSAKAGVKSGDVIISLNGKPLNSFAELRSRIATTEPGTKVKLGLLRDGKPLEVEVTLDSNTSSSASAEMIAPALQGATLSDGQLKDGTKGVKVDSVEKSSPAAQAGLQKDDVIIGVNRDRISSIAEMRKVMAAKPSIIALQVVRGNENIYLLLR

SEQ ID NO: 75666 - protein, 566 aa, Salmonella typhi
MTVKRPVSASLAKAFFYIVLLSILSTGSALLTLTSSLRDAEAINIAGSLRMQSYRLGYDLQSRSPQINAHRQLFQHALNSPVLQNLNAWYVPQAVKTRYARLHANWLEMNSRLQDGDIVWYQSNINNYVDQIDLFVLALQHYAERKVMLVVAISLAGGIGIFTLVFFTLRRIRQQVVRPLNQLVTASQRIEHGQFAPLPLDTSLPNELGLLAKTFSQMSSELHKLYRSLEASVEEKTHDLHEAHRRLEVLYQCSQALNTSQIDVHCFRHILQIVREHDAAWYLELTVGDNWRISEGTQSPDLPMQMLPVTMQDTVYGELHWQSPNVNASTPLLNSVSTMLGRGLYFNQAQKHFQQLLLMEERATIARELHDSLAQVLSYLRIQLTLLKRAIPEDNAGAQSIMADFSRALNDAYRQLRELLTTFRLTLQQADLPSALHEMLEDLQSQTPAKLKLDCRLPTLALDAQMQVHLLQIVREAVLNAIKHANASEIAVSCVTAPDGDHTVYIRDNGIGIGEPHEPAGHYGLNIMRERAERLGGTLNFSQPSGGGTLVSISFRSSNKEESQLT

SEQ ID NO: 75667 - protein, 671 aa, Salmonella typhi
MSDIDALRALTSQMTQEGIRRLLVISGDAAWCRERAEAIRAVLPGDWWVAPDAPAQPRCTPQALQTLLGREFRHAIFDAWQGFDAAAFAALSGTLQAGSWLLLLMPPYETWESRPDTDSLRWSDCAQPIPTPQFAQHLKRTLSRDPQTLLWRQRQPFCWPSYPSRERWRPATGEPQPEQAAILSRLREMPPGVATVIAPRGRGKSALAGQFISQMAGTAIVTAPAKTATDILAAFAGERFCFMAPDALLASGARADWLVVDEAAAIPAPLLLQLVSRFPRILLTTTVQGYEGTGRGFLLKFCARFPQLHRFTLRQPVRWAPECPLENIVSEALIFDDEAFAQAPHGGIAISAFYQQAWGKTPALPRAVYQLLSGAHYRTSPLDLRRMMDAPGQHFLQATANNRVAGALWLVEEGGLSAELSQAVWCGFRRPRGNLVAQSLAAHGSDPLAATLVGRRVSRIAVHPARQREGIGQQLIACACEQAAQCDYLSVSFGYTPELWRFWQRCGFVLVRMGSHREASSGCYTAMALLPLSDAGQRLAQQEHRRLRRDADILTQWNGEAIPLAALREQALNDEDWRELVGFAFAHRPLLTSLGCLHRLLQYSALPLPALRGRLEEKASDAELCARLRISGRKALLALQRAQAAQALIALDAGRTQRLRDVMPGGGDHAG

SEQ ID NO: 75668 - protein, 655 aa, Salmonella typhi
MGIFSIANQHIRFAVKLACAIVLALFIGFHFQLETPRWAVLTAAIVAAGPAFAAGGEPYSGAIRYRGMLRIIGTFIGCIAALIIIISMIRAPLLMILVCCVWAGFCTWISSLVRIENSYAWGLSGYTALIIVITIQTEPLLTPQFALERCSEIVIGIGCAILADLLFSPRSIKQEVDRELDCLLVAQYQLMQLCIKHGDSEEVDNAWGDLVRRTAALEGMRSNLNMESSRWVRANRRLKALNTLSLTLITQSCETYLIQNTRPELITDTFRELFETPVETVQDVHRQLKRMRRVIVWTGERETPVTLYSWVGAATRYLLLKRGVISNTKISATEEEILQGEPVVKVESAERHHAMVNFWRTTLSCILGTLFWLWTGWTSGNGAMVMIAVVTSLAMRLPNPRMVCIDFIYGTLAALPLGLLYFLVIIPNTQQSMLLLCLSLAVLGFFIGIEVQKRRLGSMGALASTINIIVLDNPMTFHFIQFLDSALGQIVGCMLAFIVILLVRDKSKDRTGRVLLNQFVSAAVSAMTTNVVRRKENRLPALYQQLFLLMNKFPGDLPKFRLALTMIIAHQRLRDAPIPVNEDLSVFHRQLRRTADHVISAGSDDKRRRYFGQLLDELDIYQEKLRIWEAPPQVTEPVKRLTGMLHKYQNALTDS

SEQ ID NO: 75669 - protein, 1266 aa, Salmonella typhi
MRRLPGILLLTGAALIVIAALLVSGLRLALPHLDAWRPAILNKIESVTGVPVAASQLSASWQNFGPTLEAHNIHAALKDGGELSIKRVTLALDVWQSLLHMRWQFRDLTFWQLNFRTNTPLQSSDGEGIETSRLSDLFLRQFDHFDLRDSQISFLTLSGQRAELAIPQLTWLNGKERHRAEGEVSLSSLTGQHGVMQVRMDLRDDDGLLNNGRVWLQADDIDVKPWLGKWMQDNVALQTARFSLEGWMTLSKGEIAGGDVWLKQGGASWLGDNTTHTLSVDNLTAQISREQPGWQFYIPDTRITLDGKPWPSGALTVAWLPQQDVGGENHTRSDELRIRASNLELAGLEALRPLAAKLSPVLGEIWQATQPSGKIATLALDIPLQATEKTRFQASWENLAWKQWKLLPGAEHFSGTLAGSVEDGQMKVAMQQAKMPYETVFRAPLEIENGVATLSWLKNENGFQLDGRDIDVKAKAVHARGGFRYLQPTGDEPWLGILAGISTDDGSQAWRYFPENLMGKALVDYLSGAIQGGEADNATLVYGGNPHLFPYKHNEGQFEVLVPLRNATFAFQPDWPALKNLNIELDFLNDGLWMRSDSVDLGGVKASKLAAAIPDYSKEKLLIDADINGPGKAVGPYFDETPLKDSLGSTLAELQLDGDVNARLHLDIPLDGEQVTAEGDVSLRNNSLFIKPLNSTLKNLNGKFSFVNGALKSGPLTANWFNQPLNLDFSTTEGAKAYQVAVNLNGNWQPTRMGVLPPQLNDALSGSVTWNGKVGIDLPYHADTTYHIELNGDLRNVSSHLPSPLNKPAGEAIPVNIQADGNLKSFALTGSAGSKNHFNSRWLLNQKLTLDRAIWTTDSRTIPPLPAQQGVELNLPALDGAQWLALFQKGAADNVSSSAEFPQRVTLRTPALSLGGQQWNNLSVVSAPSLNGTKIEAQGREVNATLLMRNHAPWLANIKYLYYNPGVAKTHASSPTPTSPLASANTISFRGWPDLQLRCEECWLWGQKYGRIDGDFAIKGNTLTLANGLIDTGFARLKANGEWVNAPGNERTSLKGSLHGSNLDTAAGFFGISTPIQNASFNVDYDLHWRNPPCQPEEATLNGILRTRLGKGEFTDLSSGHAGQLLRLLSFDALLRKLRFDFRDTFSEGFYFDSIHSTAWIKDGVLHTDDTLVDGLEADIAMKGSVDLVRRRLDMEAVVAAEISATVGVAAAFAVNPIVGAAVFAASKVLGPLWSKVSILRYRITGPVDAPQINEVLRQPRKESQQ

SEQ ID NO: 75670 - protein, 347 aa, Salmonella typhi; identical to SEQ ID NO: 56090

SEQ ID NO: 75671 - protein, 646 aa, Salmonella typhi
MRLTTKFSAFITLLTGLTIFVTLIGCSLSFYNAVQYKYVSRVQATATAIDTHLVTHDIVSLTPQIDELMIASDIVRVDLLQGERSVYSHSRARGYRPAGTSDMYRELVVPLIKHPGMSLRLVYQDPMGNYFHSLITTAPLTLAIGFIVLILFLSVRWLQRQLSGQELLEIRSTRILNGERGANVRGSVYEWPARTSSALDVLLSEIQFAHEQRSRLDTLIRSYAAQDTKTGLGNRLFFDNQLATLLEDQEKVGVHGVVMMIRLPDFNLLRDSLGGNQAEEQMFMLINLLSTFIMRYPGSLLARYHRSDFAVLLPHRTLKEAESIAGQLLKAVDALPANKMLDRDDMVHIGICAWRSGQSTDQVMEHAEAAARNAALQGGNSWAIYDDTLPEKGRGNVRWRTLIEQMLNRGGPRLYQKPAVTREGRVHHRELMCRIYDGKEEVSSAEYMPMVLQFGLSEEYDRLQISRLITLLGYWPDENLAMQLTVESLIRPRFQRWLRDTLMQCEKSQRNRIIIELAEADVCQHISRLQPILRLVNALGVRVAVTQAGLTLVSTSWIKALNVELLKLHPSLVRNIEKRTENQLLVQSLVEACAGTPTQVYATGVRSRGEWQTLTKRGVAGGQGDFFASSQLLDTNVKKYSQRYSV

SEQ ID NO: 75672 - protein, 284 aa, Salmonella typhi
MKQKVVNIGDIKVANDLPFVLFGGMNVLESRDLAMRICEHYVTVTQKLGIPYVFKASFDKANRSSIHSYRGPGLEEGMKIFQELKQTFGVKVITDVHEASQAQPVADVVDVIQLPAFLARQTDLVEAMAKTGAVINVKKPQFVSPGQMGNIVDKFHEGGNDKVILCDRGANFGYDNLVVDMLGFSVMKKVSGNSPVIFDVTHALQCRDPFGAASGGRRGQVTELARAGMAVGLAGLFLESHPDPANAKCDGPSALPLAKLEQFLTQIKAIDDLVKSFDELDTEN

SEQ ID NO: 75673 - protein, 208 aa, Salmonella typhi
MKIVEVKHPLVKHKLGLMRENDISTKRFRELASEVGSLLTYEATADLETEKVTIEGWNGPVEIDQIKGKKITVVPILRAGLGMMEGVLENVPSARISVVGMYRNEETLEPVPYFQKLVSNIDERMALIVDPMLATGGSVIATIDLLKKAGCSSIKVLVLVAAPEGIAALEKAHPDVELYTASIDQGLNEHGYIIPGLGDAGDKIFGTK

SEQ ID NO: 75674 - protein, 129 aa, Salmonella typhi
MTIAMLLTLHLICVALSVSLFVARYWWRYCGHALAAARWTRIVPPVIDTLLLLSGIGLIVKTHILPFTESGSWLTEKLFGVIIYIVLGFIALDYRQARSQQARFIAFPLALVVLYIIIKLATTKIPLLG

SEQ ID NO: 75675 - protein, 277 aa, Salmonella typhi
MDFQHWLHEAVNQLRDSDSPRRDAEILLEYVTGKRRTYIMAFGETPLTDVQQQQLAELLQRRKQGEPIAYLTGLREFWSLPLFVSPATLIPRPDTECLVEQALARLPVKTCRILDLGTGTGAIALALACERPDCEVTAVDRMPDAVALAIRNAEHLAIRNVRILQSCWFSALSGQQFDMIVSNPPYIDAQDPHLSEGDVRFEPRSALVADENGMADLTHIIDNARQMLTPGGFLLLEHGWRQGEAVRAAFRRSGYTDVETCRDYGGNERVACGRFTP

SEQ ID NO: 75676 - protein, 199 aa, Salmonella typhi
MRLTVKQITWLKVCLHLAGFLPLLWLFWAINHGGLSADPVKDIQHFTGRTALKFLLATLLVSPLARYAKQPLLIRTRRLLGLWCFVWATLHLTSYALLELGIHNLALLGSELISRPYLTLGIISWLVLLALTLTSTQFAQRKLGKRWQTLHNVVYLVAILAPIHYLWSVKILSPQPVIYAALALALLALRYRKFRQWWR

SEQ ID NO: 75677 - protein, 360 aa, Salmonella typhi
MKPSIVAKLEALHERHEEVQALLGDAGIIADQDRFRALSREYAQLSDVSRCFTDWQQVQDDIETAQMMLDDPEMREMAQEELREAKEKSEQLEQQLQVLLLPKDPDDERNAFLEVRAGTGGDEAALFAGDLFRMYSRYAEARRWRVEIMSMSEGEHGGYKEIIAKISGDGVYGRLKFESGGHRVQRVPATESQGRIHTSACTVAVMPELPEAELPDINPADLRIDTFRSSGAGGQHVNTTDSAIRITHLPTGIVVECQDERSQHKNKAKALSVLGARIHAAETAKRQQAEASTRRNLLGSGDRSDRNRTYNFPQGRVTDHRINLTLYRLDETMEGKLDMLIEPIVQEHQADLLAALSEQE

SEQ ID NO: 75678 - protein, 156 aa, Salmonella typhi; identical to SEQ ID NO: 75119

SEQ ID NO: 75679 - protein, 418 aa, Salmonella typhi
MTLLALGINHKTAPVSLRERVTFSPDTLDQALDSLLAQPMVQGGVVLSTCNRTELYLSVEEQDNLQEALIRWLCDYHNLNEDDLRNSLYWHQDNDAVSHLMRVASGLDSLVLGEPQILGQVKKAFADSQKGHLNASALERMFQKSFSVAKRVRTETDIGASAVSVAFAACTLARQIFESLSTVTVLLVGAGETIELVARHLREHKVQKMIIANRTRERAQALADEVGAEVISLSDIDARLQDADIIISSTASPLPIIGKGMVERALKSRRNQPMLLVDIAVPRDVEPEVGKLANAYLYSVDDLQSIISHNLAQRQAAAVEAETIVEQEASEFMAWLRAQGASETIREYRSQSEQIRDELTTKALSALQQGGDAQAILQDLAWKLTNRLIHAPTKSLQQAARDGDDERLNILRDSLGLE

SEQ ID NO: 75680 - protein, 449 aa, Salmonella typhi; identical to SEQ ID NO: 75120

SEQ ID NO: 75681 - protein, 737 aa, Salmonella typhi
MKLNKTYINIRDKWWGLPLILPSILLPVLSSANTYALTSTGNVVLFYLPLAFMLSLMLFFGWAALPGIVLAIFWRRYPQTGLYETLSVTMHFIITIVLSWGGYRVFSPRRNNVSHGDAHLLFQRMFWQVFCSATLFLVIYQFAAFVGMYESKASLMGVMPFNINTLINYQALLVGNLVGVPLCYFIIRTLRNPLHLRGYYQQLKLQIDSKATKKEIVIWLAVLTTLMFILCMPLTDNSSIFSTNYTLSLLLPVMLWGAMRYGYKFISIIWAVVLITSIHYYQRYMPWYSGYDTQLAITSSSYLVFSFIVNYMSVLATRQRVVSGRARRLAYLDPVVHLPNLRALNRALKNAPWSTICFLHVPGLELLGKNYGVMLRIQYKQKLSHWITPMLASNECVYQMSGHDLVLRLNTEAHQQRIEALDKHIKQFRFIWDGLPLQPPVGVSYCCVRSPVSHLYLLLGELSTSSDLSLTTNAPEDLQRRGAMHLQRDLKGRIAMMNRLQQALEHDHFFLMAQPIFGVRGDVYHEILLRLRDDNGDVINPDNFLPVAHEFGLSSAIDLWVIENTLRFMAASREYMPAHRFAINLSPTSVCRARFPAEVKQLLTQYQVEPWQLVFEVTESNSLTNAEQAQLTLGQLQQFGCQIAIDDFGTGYASYARLKNVDADILKIDGSFIRNIVSNSLDYQIVASICHLARMKNMQVVAEYIESEEIRSVVLSLGIDYLQGYLIGEPQLLSEIQ

SEQ ID NO: 75682 - protein, 483 aa, Salmonella typhi
MQLEVILPLVAYLVVVFGVSIYAMRKRTAGTFLNEYFLGSRSMGGIVLAMTLTATYISASSFIGGPGAAYKYGLGWVLLAMIQLPAVWLSLGILGKKFAILARRYNAVTLNDMLFARYQSRLLVWLASLSLLVAFIGAMTVQFIGGARLLETAAGIPYETGLLIFGVSIALYTAFGGFRASVLNDTLQGLVMLVGTIVLLVGVVHAAGGLHQAVDTLHALDPKLVTPQGADDILSPAFMTSFWVLVCFGVIGLPHTAVRCISYKDSKAVHRGIIIGTIVVAILMFGMHLAGALGRAVLPDLTVPDLVIPTLMVKVLPPFAAGIFLAAPMAAIMSTINAQLLQSSATIIKDLYLNLRPDQMQNEIRLKRMSAAITLLLGALLLLAAWKPPEMIIWLNLLAFGGLEAVFLWPLVLGLYWERANAAGALSAMIVGGVLYALLATFNIQYLGFHPIVPALLLSLLAFLIGNRFGSSASQATVLSTDK

SEQ ID NO: 75683 - protein, 315 aa, Salmonella typhi
MPDMKLFAGNATPELAQRIANRLYTSLGDAAVGRFSDGEVSVQINENVRGGDIFIIQSTCAPTNDNLMELVVMVDALRRASAGRITAVIPYFGYARQDRRVRSARVPITAKVVADFLSSVGVDRVLTVDLHAEQIQGFFDVPVDNVFGSPILLEDMLQLNLDNPIVVSPDIGGVVRARAIAKLLNDTDMAIIDKRRPRANVSQVMHIIGDVAGRDCVLVDDMIDTGGTLCKAAEALKERGAKRVFAYATHPIFSGNAANNLRNSVIDEVVVCDTIPLTDEIKALPNVRTLTLSGMLAEAIRRISNEESISAMFEH

SEQ ID NO: 75684 - protein, 561 aa, Salmonella typhi
MNKLFSSHVMPFRALIDACWKEKYTASRFTRDVIAGITVGIIAIPLAMALAIGSGVAPQYGLYTSAVAGIVIALTGGSRFSVSGPTAAFVVILYPVSQQFGLAGLLVATLMSGFFLILFGLARLGRLIEYIPVSVTLGFTSGIGITIGTMQIKDFLGLQMAHVPEHYLQKVGALFMALPTVNIGDAAIGVVTLGTLIFWPRLGIRLPGHLPALLAGCAVMGIVNLLGGNVATIGSQFHYVLADGTQGNGIPQLLPQLMLPWSLPGSDFTLSWDSLRALLPAAFSMAMLGAIESLLCAVVLDGMTGTKHKANSELIGQGLGNMVAPFFGGITATAAIARSAANVRAGATSPVSAVIHAILVILALLVLAPLLSWLPLSAMAALLLMVAWNMSEAHKVVDLLRHAPKDDIIVMLLCMSLTVLFDMVIAISVGIVLASLLFMRRIARMTRLAPVNVDVPEDVLVLRVIGPLFFAAAEGLFTDLESRIKGKRIVVLKWDAVPVLDAGGLDAFQRFVKRLPEGCELRISNLEFQPLRTMARAGIKPIPGRLTFFPNRTEALADLLS

SEQ ID NO: 75685 - protein, 525 aa, Salmonella typhi
MTENIHKHRILILDFGSQYTQLVARRVRELGVYCELWAWDVTEAQIRDFNPSGIILSGGPESTTEENSPRAPQYVFEAGVPVFGVCYGMQTMAMQLGGHVEGSNEREFGYAQVEVLTDSALVRGIEDSLTADGKPLLDVWMSHGDKVTAIPSDFVTVASTESCPFAIMANEEKRFYGVQFHPEVTHTRQGMRMLERFVRDICQCEALWTPAKIIDDAVARIREQVGDDKVILGLSGGVDSSVTAMLLHRAIGKNLTCVFVDNGLLRLNEAEQVMDMFGDHFGLNIVHVPAEDRFLSALAGENDPEAKRKIIGRVFVEVFDEEALKLEDVKWLAQGTIYPDVIESAASATGKAHVIKSHHNVGGLPKEMKMGLVEPLKELFKDEVRKIGLELGLPYDMLYRHPFPGPGLGVRVLGEVKKEYCDLLRRADAIFIEELRKADLYDKVSQAFTVFLPVRSVGVMGDGRKYDWVVSLRAVETIDFMTAHWAHLPYDFLGRVSNRIINEVNGISRVVYDISGKPPATIEWE

SEQ ID NO: 75686 - protein, 363 aa, Salmonella typhi; identical to SEQ ID NO: 75025

SEQ ID NO: 75687 - protein, 449 aa, Salmonella typhi
MLSSQTSSIFTVSRLNQTVRLLLEQEMGQVWISGEISNFTQPASGHWYFTLKDDTAQVRCAMFRNSNRRVTFRPQHGQQVLVRANITLYEPRGDYQIIAESMQPAGEGLLQQKYEQLKAKLHAEGLFDQQHKQPLPSPAHCVGVITSKTGAALHDILHVLKRRDPSLPVIIYPTAVQGDDAPGQIVRAIELANTRGECDVLIVGRGGGSLEDLWSFNDERVARAIFASRIPVVSAVGHETDVTIADFVADLRAPTPSAAAEIVSRNQQELLRQIQSAQQRLGMAMDYYLANRSRRFTQIFHRLQQQHPQLRLARQQTALERLRQRMGFALEARIKQATQRQQRVSQRLSQQNPQPRIHRVQSRIQQLEYRLTENIRSRLSEQRERFGNAVTHLEAVSPLATLARGYTVSTTTDGKVLKKIKQVKAGDIMTTRLEDGWLESEVKSVTPGT

SEQ ID NO: 75688 - protein, 490 aa, Salmonella typhi
MVPVVALVGRPNVGKSTLFNRLTRTRDALVADFPGLTRDRKYGRAEVEGREFICIDTGGIDGTEDGVETRMAEQSLLAIEEADVVLFMVDARAGLMPADEAIAKHLRSREKPTFLVANKTDGLDPDQAVVDFYSLGLGEIYPIAASHGRGVLSLLEHVLLPWMDDVAPQEEVDEDAEYWAQFEAEQNGEEAPEDDFDPQSLPIKLAIVGRPNVGKSTLTNRILGEERVVVYDMPGTTRDSIYIPMERDEREYVLIDTAGVRKRGKITDAVEKFSVIKTLQAIEDANVVLLVIDAREGISDQDLSLLGFILNSGRSLVIVVNKWDGLSQEVKEQVKETLDFRLGFIDFARVHFISALHGSGVGNLFESVREAYDSSTRRVSTAMLTRIMTMAVEDHQPPLVRGRRVKLKYAHTGGYNPPIVVIHGNQVKDLPDSYKRYLMNYFRKSLEVMGTPIRIQFKEGENPYANKRNTLTPTQMRKRKRLMKHIKKSK

SEQ ID NO: 75689 - protein, 392 aa, Salmonella typhi
MQLRKLLLPGLLSVTLLSGCSLFSGEEDVVKMSPLPQVENQFTPTTVWSTSVGNGIGEFYSNLHPVMADNVVYAADRAGVVKALNADDGKEIWSVNLGEKDGWFSRSSALLSGGVTVAGGHVYIGSEKAEVYALNTSDGTTAWQTKVAGEALSRPVVSDGIVLIHTSNGQLQALNQADGAIKWTVNLDMPSLSLRGESAPATAFGAAIVGGDNGRVSAVLMQQGQMIWQQRISQATGPTEIDRLSDVDTTPVVVNGVVYALAYNGNLTALDLRSGQIMWKRELGSVNDFIVDGDRIYLVDQNDRVLALTTDGGVTLWTQSDLLHRLLTSPVLYNGDLVVGDSEGYLHWINVDDGRFVAQQKVDSSGFLTEPTVADGKLLIQAKDGTVYAITR

SEQ ID NO: 75690 - protein, 424 aa, Salmonella typhi
MAKNIQAIRGMNDYLPGETAIWQRIEGTLKNVLGSYGYSEIRLPIVEQTPLFKRAIGEVTDVVEKEMYTFEDRNGDSLTLRPEGTAGCVRAGIEHGLLYNQEQRLWYIGPMFRHERPQKGRYRQFHQLGAEVFGLQGPDIDAELIMLTARWWRALGISEHVSLELNSIGSLEARANYRDALVAFLEQHQETLDEDCKRRMYTNPLRVLDSKNPDVQALLNDAPVLGDYLDDDSREHFAGLCKLLDAAGIAYTVNQRLVRGLDYYNRTVFEWVTNSLGSQGTVCAGGRYDGLVEQLGGRATPAVGFAMGLERLVLLVQAVNPEFIASPVVDIYLVAAGAQTQSAAMTLAERLRDEMPGVKLMTNHGGGNFKKQFARADKWGARIALVLGESEVADGTVVVKDLRSGEQTAVAQDSVAAHLRTLLG

SEQ ID NO: 75691 - protein, 372 aa, Salmonella typhi
MHNQAPIQRRKSTRIYVGNVPIGDGAPIAVQSMTNTRTTDVEATVNQIKALERVGADIVRVSVPTMDAAEAFKLIKQQVSVPLVADIHFDYRIALKVAEYGVDCLRINPGNIGNEERIRMVVDCARDKNIPIRIGVNAGSLEKDLQEKYGEPTPQALLESAMRHVDHLDRLNFDQFKVSVKASDVFLAVESYRLLAKQIDQPLHLGITEAGGARSGAVKSAIGLGLLLSEGIGDTLRVSLAADPVEEIKVGFDILKSLRIRARGINFIACPTCSRQEFDVIGTVNALEQRLEDIITPMDVSIIGCVVNGPGEALVSTLGVTGGNKKSGLYEDGVRKDRLDNDDMIAQLESRIRAKVSQLDEARRIDVLQVEK

SEQ ID NO: 75692 - protein, 510 aa, Salmonella typhi
MAMIDSMNKDTTRLSDGPDWTFDLLDVYLAEIDRVAKLYQLDTYPHQIEVITSEQMMDAYSSVGMPINYPHWSFGKKFIETERLYKHGQQGLAYEIVINSNPCIAYLMEENTITMQALVMAHACYGHNSFFKNNYLFRSWTDASSIVDYLIFARNYITRCEERYGVDEVEKLLDSCHALMNYGVDRYKRPQKISLQEEKARQKSREEYLQSQVNMLWRTLPKREEEKTVAEARRFPAEPQENLLYFMEKNAPLLEPWQREILRIVRKVSQYFYPQKQTQVMNEGWATFWHYTILNHLYDEGKVTERFMLEFLHSHTNVVFQPPYNSPWYSGINPYALGFAMFQDIKRICQSPTDEDKYWFPDIAGSDWLETLHFAMRDFKDESFISQFLSPKVMRDFRFFTVLDDDRHNYLEISAIHNEEGYREIRSKLSSQYNLSNLEPNIQVWNVDLRGDRSLTLRYIPHNRAPLDKGRKEVLKHVHRLWGFDVMLEQQNEDGSVELLERCPPRMNTL

SEQ ID NO: 75693 - protein, 324 aa, Salmonella typhi
MNTEATHDQNEAQTTGVRLRNAREQLGLSQQAVAERLCLKVSTVRDIEEDKAPSDLASTFLRGYIRSYARLVHVPEEELLPGLEKQAPLRAAKVAPMQSFSLGKRRKKRDGWLMSFTWLVLFVVVGLTGAWWWQNHKAQQEEITTMADQSTAELNADKDSGQSVPLDTSAATSQDTTPAQTAPAPATPVDSTAATQNTVVAPSQANVDTAATSAAPAATETPSALPTSQAGVAAPAADPNALVMNFTADCWLEVTDATGKKLFSGMQRKDGNLNLTGQAPYKLKIGAPAAVQIQYQGKPVDLSRFIRTNQVARLTLNAEPTPAQ

SEQ ID NO: 75694 - protein, 219 aa, Salmonella typhi
MYQHRNWQGALLDYPVSKVVCVGSNYANHIKEMGSATPEEPVLFIKPETALCDIRQPLAIPADMGAVHHEVELAVLIGATLRQATEDHVRKAIAGYGVALDLTLRDIQGKMKKAGQPWEKAKGFDNACPISGFIPVAAFCGDPQNTVIGLNVNGEVRQQGSTADMIHPIVPLIAYMSRYFTLKAGDVVLTGTPAGVGPLLSGDELDIRFNGETLSTRVL

SEQ ID NO: 75695 - protein, 110 aa, Salmonella typhi
MRQVTIPLIQSKSMFCVIYRSSKRDQTYLYVEKKDDFSRVPDALMKGFGQPQLAMMLPLDGRKKLVNAELEKVKQALSEQGYYLQLPPPPEDLLKQHLSSVGQNTSHADR

SEQ ID NO: 75696 - protein, 454 aa, Salmonella typhi
MMKTLSPTVITLPWRPDAAEHYFAPVNHLPWAMLLHSGDAIHPYNRFDILVADPVTTLTTRAQETTVCTARTTTVTLDDPLHVLQTQLEALPFHPQPDPDLPFQGGALGLFGYDLGRRFEILPDTAARDIALPDMAIGLYDWALIVDHHKQVVSLISYHDADARYRWLTGQRAPTRTPFRLTSAWQSNMTRCEYGEKFRQVQAWLHSGDCYQVNLSQRFQASYEGDEWQAFERLNRANRAPFSAFLRLHDGAILSLSPERFIQLENGHIQTRPIKGTLPRLNDPQADRQQAQKLANSMKDRAENLMIVDLMRNDIGRVAVPGSVKVPELFVVEPFPAVHHLVSTITARLPDSLHATDLLRAAFPGGSITGAPKVRAMEIIDELEPQRRNAWCGSIGYLSFCGKMDTSITIRTVTATQGQLYCSAGGGIVADSNEEAEYQETFDKVNRILHPLEN

SEQ ID NO: 75697 - protein, 192 aa, Salmonella typhi
MDTSRLTLDHFLSRFQLLRPQMTHETLNQRQAAVLIPVVRRPQPGLLLTQRAIHLRKHAGQVAFPGGAVDSTDASLIAAALREAQEEVAIPPQAVEVIGVLPPVDSVTGFQVTPVVGIIPPNLPWRASEDEVSAVFEMPLAQALQLGRYHPLDVYRRGNSHRVWLSWYEHYFVWGMTANILRELALQIGVKP

SEQ ID NO: 75698 - protein, 454 aa, Salmonella typhi
MISLFDMFKVGIGPSSSHTVGPMKAGKQFVDDLVEKGLLDNVTRVAVDVYGSLSLTGKGHHTDIAIIMGLAGNEPATVDIDSIPGFIRDVETRERLLLAQGRHEVDFPKDDGMRFHNGNLPLHENGMQIHAWHDDTVIYSKTYYSIGGGFIVDEAHFGQEATNEVTVPYPFKSAKEMLEYCNSTGLSLSGMVMQNELALHSKKEIEEYFGHVWQTMQACIDRGMNTEGVLPGPLRVPRRASALRRMLVSSDKLSSDPMNVIDWVNMFALAVNEENAAGGRVVTAPTNGACGIVPAVLAYYDHFIESVSPDIYTRYFLAAGAIGALYKMNASISGAEVGCQGEVGVACSMAAAGLAELLGASPEQVCVAAEIGMEHNLGLTCDPVAGQVQVPCIERNAIASVKAINAARMAMRRTSAPRVSLDKVIETMYETGKDMNAKYRETSRGGLAIKVQCD

SEQ ID NO: 75699 - protein, 322 aa, Salmonella typhi
MTIAIVIGTHGWAAEQLLKTAEMLLGEQENVGWIDFVPGENAETLIEKYNAQLAKLDTSKGVLFLVDTWGGSPFNAASRIVVDKERYEVIAGVNIPMLVETFMARDDDPSFDELVALAVETGREGVKALKAKPVEKAAPAPVAAAPKAATPAKPMGPNDYMVIGLARIDDRLIHGQVATRWTKETNVSRIIVVSDEVAADTVRKTLLTQVAPPGVTAHVVDVAKMIRVYNNPKYAGERVMLLFTNPTDVERIVEGGVKVTSVNIGGMAYRQGKTQVNNAVSVDEKDIEAFKKLNERGIELEVRKVSTDPKLKMMDLIAKVAK

SEQ ID NO: 75700 - protein, 581 aa, Salmonella typhi
MKKKSDGDTRNFTPIRFALLCTAILLSMALLLGRVAWLQIVTPSKLVKQEDMRSLREVTTASPRGMITDREGRPLAVSVPVNAVWADPKTIISKGGVGYNERWQALASALHLSLSTLAERVNSNPAGRFIYLARQVSPQQAEWIDKLNLPGINLREESRRFYPAGHVAANLIGFTNIDGQGIEGIEKSFNAQLTGKPGSRLVRKDKFGHVIENITEVNPVPAHELQLSIDERLQTVTEDALDNAVIWNKAESGAAVLINIPTGEILSMASYPDFNPNNREGAQLDDFRNRAISDTFEPGSTVKPLVIMTALQQGIVQPDSVIDTHPFTLDGHRIRDVGYYPELTLTGILQKSSDTGVSHLSLAMPVQKLMDTYKSFGFGVPTGLGLTGESSGLLPKRRYWSDLDRATFAFGYGLMVTPLQLAHVYATIGSFGIYRPLSITKVDPPVIGTRVMPEELVHEVEHMMESVALPGGGGTKAAVRDYRIAVKTGTAKKIGDDGKYVDKYVAYTAGVAPASNPRFALVVVINNPQNGAYYGGAVSAPVFSQIMGDVLRLENVEPDGMPADSDHLLVMHGSHVAVPGS

SEQ ID NO: 75701 - protein, 635 aa, Salmonella typhi
MIVFSSLQIRRGVRVLLDNASATINPGQKVGLVGKNGCGKSTLLALLKNEISADAGSFTLPGTWQLAWVNQETPALPQPAIEYVIDGDREYRHLEAQLNDANERNDGHAIASIHGKLDAIDAWTVRSRAASLLHGLGFSNDQLERPVSDFSGGWRMRLNLAQALICRSDLLLLDEPTNHLDLDAVIWLEKWLKSYPGTLILISHDRDFLDPIVDKIIHIEQQTLFEYTGNYSAFEVQRATRLAQQQAMYESQQERVAHLQSYIDRFRAKATKAKQAQSRIKMLERMELIAPAHVDNPFHFSFRAPESLPNPLLKMEKVSAGYGDRIILESIKLNLVPGSRIGLLGRNGAGKSTLIKLLAGELEPLHGEIGLAKGIKLGYFAQHQLEFLRADESPLQHMARLAPQELEQKLRDYLGGFGFQGDKVTEETQRFSGGEKARLVLALIVWQRPNLLLLDEPTNHLDLDMRQALTEALIDFEGALVVVSHDRHLIRSTTDDLYLVHDKKVEPFDGDLEDYQQWLSDVQKQENQADDAPKENNANSAQSRKDQKRREAELRTLTQPLRKEITRLEKEMEKLNAQLAQAEEKLGDSSLYDPSRKAEMTECLQLQASAKSGLEECEMAWLEAQEQLEQMMQND

SEQ ID NO: 75702 - protein, 124 aa, Salmonella typhi; identical to SEQ ID NO: 42609

SEQ ID NO: 75703 - protein, 156 aa, Salmonella typhi
MPRRRVIGQRKILPDPKFGSELLAKFVNILMVDGKKSTAESIVYSALETLAQRSGKSELEAFEVALENVRPTVEVKSRRVGGSTYQVPVEVRPVRRNALAMRWIVEAARKRGDKSMALRLANELSDAADNKGTAVKKREDVHRMAEANKAFAHYRW

SEQ ID NO: 75704 - protein, 704 aa, Salmonella typhi
MARTTPIARYRNIGISAHIDAGKTTTTERILFYTGVNHKIGEVHDGAATMDWMEQEQERGITITSAATTAFWSGMAKQYEPHRINIIDTPGHVDFTIEVERSMRVLDGAVMVYCAVGGVQPQSETVWRQANKYKVPRIAFVNKMDRMGANFLKVVGQIKTRLGANPVPLQLAIGAEEGFTGVVDLVKMKAINWNDADQGVTFEYEDIPADMQDLANEWHQNLIESAAEASEELMEKYLGGEELTEEEIKQALRQRVLNNEIILVTCGSAFKNKGVQAMLDAVIDYLPSPVDVPAINGILDDGKDTPAERHASDDEPFSALAFKIATDPFVGNLTFFRVYSGVVNSGDTVLNSVKTARERFGRIVQMHANKREEIKEVRAGDIAAAIGLKDVTTGDTLCDPENPIILERMEFPEPVISIAVEPKTKADQEKMGLALGRLAKEDPSFRVWTDEESNQTIIAGMGELHLDIIVDRMKREFNVEANVGKPQVAYREAIRAKVTDIEGKHAKQSGGRGQYGHVVIDMYPLEPGSNPKGYEFINDIKGGVIPGEYIPAVDKGIQEQLKSGPLAGYPVVDLGVRLHFGSYHDVDSSELAFKLAASIAFKEGFKKAKPVLLEPIMKVEVETPEENTGDVIGDLSRRRGMLKGQESEVTGVKIHAEVPLSEMFGYATQLRSLTKGRASYTMEFLKYDDAPNNVAQAVIEARGK

SEQ ID NO: 75705 - protein, 394 aa, Salmonella typhi; identical to SEQ ID NO: 75081

SEQ ID NO: 75706 - protein, 103 aa, Salmonella typhi; identical to SEQ ID NO: 55649

SEQ ID NO: 75707 - protein, 209 aa, Salmonella typhi
MIGLVGKKVGMTRIFTEDGVSIPVTVIEVEANRVTQVKDLANDGYRAVQVTTGAKKANRVTKPEAGHFAKAGVEAGRGLWEFRLAEGEEYTVGQSISVELFADVKKVDVTGTSKGKGFAGTVKRWNFRTQDATHGNSLSHRVPGSIGQNQTPGKVFKGKKMAGQMGNERVTVQSLDVVRVDAERNLLLVKGGVPGATGCDLIVKPAVKA

SEQ ID NO: 75708 - protein, 201 aa, Salmonella typhi [sequence omitted]

SEQ ID NO: 75709 - protein, 100 aa, Salmonella typhi; identical to SEQ ID NO: 59326

SEQ ID NO: 75710 - protein, 273 aa, Salmonella typhi
MAVVKCKPTSPGRRHVVKVVNPELHKGKPFAPLVEKNSKSGGRNNNGRITTRHIGGGHKQAYRIVDFKRNKDGIPAVVERLEYDPNRSANIALVLYKDGERRYILAPKGLKAGDQIQSGVDAAIKAGNTLPMRNIPVGSTVHNVEMKPGKGGQLARSAGTYVQIVARDGAYVTLRLRSGEMRKVEADCRATLGEVGNAEHMLRVLGKAGAARWRGVRPTVRGTAMNPVDHPHGGGEGRNFGKHPVTPWGVQTKGKKTRSNKRTDKFIVRRRSK

SEQ ID NO: 75711 - protein, 311 aa, Salmonella typhi
MALPIIIDCDPGHDDAIALVLALASPELEVKAITSSAGNQTPEKTLRNVLRMLTLLKRPDIPVAGGAVKPLMRELIIADNVHGESGLDGPALPEPSFAPQSGTAVELMAKTLRESAQPVTIVSTGPQTNVALLLNSHPELHTKIARIVIMGGAMALGNWTPAAEFNIYVDPEAAEIVFQSGIPVVMAGLDVTHKAQIHAADIERFRDIGNPISTIVAELLDFFFEYHKDEKWGFVGAPLHDPCTIAWLLKPEIFTTVERWVGVETQGKYTQGMTVVDYYFLTGNKPNATVMVDVDRQGFVDLLAERLQYYA

SEQ ID NO: 75712 - protein, 308 aa, Salmonella typhi
MIKELDMQLRKLTTAMLVMGLSAGLAHAEDGAPAAGSTLDKIAKNGVIVVGHRESSVPFSYYDNQQKVVGYSQDYSNAIVEVVKKKLNKPDLQVKLIPITSQNRIPLLQNGTFDFECGSTTNNLERQKQAAFSDTIFVVGTRLLTKKGGDIKDFPDLKGKAVVVTSGTTSEILLHKLNEEQKMGMRIISAKDHGDSFRTLESGRAVAFMMDDALLAGERAKAKKPDNWEIVGKPQSQEAYGCMLRKNDPEFKKLMDDTIAQAQTSGEAEKWFDKWFKNPIPPKNLNMNFELSDEMKALFKAPNDKALN

SEQ ID NO: 75713 - protein, 512 aa, Salmonella typhi
MAFASLIERQRIRLLLALLFGACGTLAFSPYDVWPAAIVSLIGLQALTFNRRPLQSAAIGYCWGLGLFGSGINWVYVSIAQFGGMPGPVNVFLVVLLAAYLSLYTGLFAGILSRLWPKTNWLRVAIAAPAIWQITEFLRGWVLTGFPWLQFGYSQVDGPLKGLAPVMGVEAINFLLMMVSGLLALALATRNWRPLAVAVILFALPFPLRYIQWFTLEPTKATQVSLVQGDIPQSLKWDENQLLNTLNIYLNETRPELGKSQIIIWPESAIPDLEINQQPFLRSLDEMLREKNSTLITGIVDARLNKQNRYDTYNTIITLGKDNPYSYDSPNRYNKNHLVPFGEFVPLESILRPLAPFFDLPMSSFSRGPYIQPQLHAHDYKLTAAICYEIILGEQVRDNFRPDTDYLLTISNDAWFGKSIGPWQHFQMARMRSLELARPLLRSTNNGITAVIGPQGEIQAMIPQFTRQVLTTKVTPTTGLTPYARTGDWTVWLITVLFGFGALVMSLRQRRK

SEQ ID NO: 75714 - protein, 292 aa, Salmonella typhi
MSDDNSHSSDTVNSKKGFFSLLLSQLFHGEPKNRDELLALIRDSGQNELIDEDTRDMLEGVMDIADQRVRDIMIPRSQMITLKRNQTLDECLDVIIESAHSRFPVISEDKDHIEGILMAKDLLPFMRSDAEAFSMDKVLRTAVVVPESKRVDRMLKEFRSQRYHMAIVIDEFGGVSGLVTIEDILELIVGEIEDEYDEEDDIDFRQLSRHTWTIRALASIEDFNDAFGTHFSDEEVDTIGGLVMQAFGHLPARGETIDIDGYQFKVAMADSRRIIQVHVRIPDDSPQPKLDE

SEQ ID NO: 75715 - protein, 92 aa, Salmonella typhi; identical to SEQ ID NO: 59328

SEQ ID NO: 75716 - protein, 110 aa, Salmonella typhi [sequence omitted]

SEQ ID NO: 75717 - protein, 233 aa, Salmonella typhi; identical to SEQ ID NO: 42750

SEQ ID NO: 75718 - protein, 136 aa, Salmonella typhi; identical to SEQ ID NO: 73545

SEQ ID NO: 75719 - protein, 84 aa, Salmonella typhi
MTDKIRTLQGRVVSDKMEKSIVVAIERFVKHPIYGKFIKRTTKMHVHDENNECGIGDVVEIRECRPLSKTKSWTLVRVVEKAVL

SEQ ID NO: 75720 - protein, 123 aa, Salmonella typhi; identical to SEQ ID NO: 73543

SEQ ID NO: 75721 - protein, 104 aa, Salmonella typhi
MAAKIRRDDEVIVLTGKDKGKRGKVKNVLSSGKVIVEGINLVKKHQKPVPALNQPGGIVEKEAAIQVSNVAIFNTATGKADRVGFRFEDGKKVRFFKSNSETIK

SEQ ID NO: 75722 - protein, 179 aa, Salmonella typhi; identical to SEQ ID NO: 73567

SEQ ID NO: 75723 - protein, 101 aa, Salmonella typhi
MAKQSMKAREVKRVALADKYFAKRAELKAIISDVNATDEDRWNAVLKLQTLPRDSSPSRQRNRCRQTGRPHAFLRKFGLSRIKVREAAMRGEIPGLKKASW

SEQ ID NO: 75724 - protein, 130 aa, Salmonella typhi; identical to SEQ ID NO: 42945

SEQ ID NO: 75725 - protein, 391 aa, Salmonella typhi
MTNQPTEIAIVGGGMVGGALALGLAQQGFTVMVIEHAAPAPFVADSQPDVRISAISAASVALLKGLGVWEAVQGMRSHPYRRLETWEWENAHVVFDAAELKLPLLGYMVENNVLQQALWQALEAHPGVTLRVPASLAALHRRHDGYALELADGEWVTPKLVIGADGANSQVRQMAGIGIHAWQYAQSCMLITVKCENAPGDSTWQQFTPTGPRAFLPLFDDWASLVWYDAPARIRQLQSLSMTQLQVEINQHFPARLGAVMPVAAGAFPLTRRHALQYAQPGLALVGDAAHTIHPLAGQGVNLGYRDVDALIDVLASARSYGESWASHSVLKRYQTRRMADNFMMQSGMDLFYAGFSNELPPLRILRNMGLMAAQRAGVLKRQALKYALGL

SEQ ID NO: 75726 - protein, 554 aa, Salmonella typhi
MCSIFGVFDIKTDAAELRKKALELSRLMRHRGPDWSGIYACDNAILAHERLSIVDVNAGAQPLYNAKKTHVLAVNGEIYNHQTLRAEYGDRYAFQTGSDCEVILALYQEKGPDFLDDLQGMFAFALYDSEKDAYLIGRDHIGIIPLYMGYDEFGNFYVASEMKALTPVCRTIKEFPAGSYLWSKDGEIRQYYQRDWFDYDAVKDNVTDKNALRQALEESVKSHLMSDVPYGVLLSGGLDSSVISAITKKFAARRVEDQERSEAWWPQLHSFAVGLEGSPDLKAAQEVANHLGTVHHEIHFTVQEGLDAIRDVIYHIETYDVTTIRASTPMYLMSRKIKAMGIKMVLSGEGSDEVFGGYLYFHKAPNAKELHEETVRKLQALHMYDCTRANKAMSAWGVEARVPFLDKKFLDVAMRINPQDKMCGNGKMEKHVLRECFESYLPASVAWRQKEQFSDGVGYSWIDTLKEVAAKQISDQQLETARFRFPYNTPSSKEAYLYREIFEELFPVPSAAECVPGGPSVACSSAKAIEWDEAFKTMDDPSGRAVGVHQSAYQ

SEQ ID NO: 75727 - protein, 406 aa, Salmonella typhi
MTPGGQAQIGNVDLVKQLNSAAVYRLIDQHGPISRIQIAEQSQLAPASVTKITRQLIERGLIKEVDQQASTGGRRAISIVTETRNFHAIGVRLGRHDTTLTLYDLSSKVVAEEHYPLPERTQETLEHALLNTIAVFIDSCQRKIRELIAISVILPGLVDPESGVIRYMPHIQVENWGLVEALEKRFHVTCFVGHDIRSLALAEHYFGASQDCEDSILVRVHRGTGAGIISNGRIFIGRNGNVGEIGHIQVEPLGERCHCGNFGCLETIAANAAIEQRVLNLLKQGYQSRVPLDDCTIKTICKAANRGDSLASEVIEHVGRHLGKTIAIAINLFNPQKIVIAGEIIEADKVLLPAIESCINTQALKAFRKNLPVVRSTLDHRSAIGAFALVKRAMLNGTLLQRLLES

SEQ ID NO: 75728 - protein, 177 aa, Salmonella typhi; identical to SEQ ID NO: 73563

SEQ ID NO: 75729 - protein, 117 aa, Salmonella typhi
MDKKSARIRRATRARRKLKELGATRLVVHRTPRHIYAQVIAPNGSEVLVAASTVEKAIAEQLKYTGNKDAAAAVGKAVAERALEKGIKDVSFDRSGFQYHGRVQALADAAREAGLQF

SEQ ID NO: 75730 - protein, 167 aa, Salmonella typhi; identical to SEQ ID NO: 42699

SEQ ID NO: 75731 - protein, 144 aa, Salmonella typhi; identical to SEQ ID NO: 73561

SEQ ID NO: 75732 - protein, 443 aa, Salmonella typhi
MAKQPGLDFQSAKGGLGELKRRLLFVIGALIVFRIGSFIPIPGIDAAVLAKLLEQQRGTIIEMFNMFSGGALSRASIFALGIMPYISASIIIQLLTVVHPTLAEIKKEGESGRRKISQYTRYGTLVLAIFQSIGIATGLPNMPGMQGLVMNPGFAFYFTAVVSLVTGTMFLMWLGEQITERGIGNGISIIIFAGIVAGLPPAIAHTIEQARQGDLHFLVLLLVAVLVFAVTFFVVFVERGQRRIVVNYAKRQQGRRVYAAQSTHLPLKVNMAGVIPAIFASSIILFPATIASWFGGGTGWNWLTTISLYLQPGQPLYVLLYASAIIFFCFFYTALVFNPRETADNLKKSGAFVPGIRPGEQTAKYIDKVMTHLTLVGALYITFICLIPEFMRDAMKVPFYFGGTSLLIVVVVIMDFMAQVQTLMMSSQYESALKKANLKGYGR

SEQ ID NO: 75733 - protein, 118 aa, Salmonella typhi
MARIAGINIPDQKHAVIALTSIYGVGKTRSKAILAAAGIAENVKISELSEEQIDTLRDEVAKFVVEGDLRREISMSIKRLMDLGCYRGLRHRRGLPVRGQRTKTNARTRKGPCKPIKK

SEQ ID NO: 75734 - protein, 129 aa, Salmonella typhi
MAKAPVCARKRVRKQVSDGVAHIHASFNNTIVTITDRQGNALGWATAGGSGFRGSRKSTPFAAQVAAERCADAVKEYGIKNLEVMVKGPGPGRESTIRALNAAGFRITNITDVTPIPHNGCRPPKKRRV

SEQ ID NO: 75735 - protein, 206 aa, Salmonella typhi
MARYLGPKLKLSRREGTDLFLKSGVRAIDTKCKIGQAPGQHGARKPRLSDYGVQLREKQKVRRIYGVLERQFRNYYKEAARLKGNTGENLLALLEGRLDNVVYRMGFGATRAEARQLVSHKAIMVNGRVVNIASYQVSPNDVVSIREKAKKQSRVKAALELAEQREKPTWLEVDAGKMEGTYKRKPERSDLSADINEHLIVELYSK

SEQ ID NO: 75736 - protein, 329 aa, Salmonella typhi [sequence omitted]

SEQ ID NO: 75737 - protein, 127 aa, Salmonella typhi
MRHRKSGRQLNRNSSHRQAMFRNMAGSLVRHEIIKTTLPKAKELRRVVEPLITLAKTDSVANRRLAFARTRDNEIVAKLFNELGPRFASRAGGYTRILKCGFRAGDNAPMAYIELVDRSEKTEAAAE

SEQ ID NO: 75738 - protein, 384 aa, Salmonella typhi
MYALTQGRIFTGHEILDDHALVVANGLIDRVCPMAELPPGIEQRSLNGAILSPGFIDVQLNGCGGVQFNDTAEAVSVETLEIMQKANEKSGCTNFLPTLITTSDELMKQGIRVMREYLEKHPHQALGLHLEGPWLNLVKKGTHNPDFVRKPDAALVDFLCDNADVITKVTLAPEMVPADVIAKLANAGIVVSAGHSNATLKEAKAGFRAGITFATHLFNAMPYITGREPGLAGAVLDEADIYCGVIADGLHVDYANIRNAKRLKGDKLCLVTDATAPAGANIEQFIFAGKTIYYRNGLCVDENGTLSGSSLTMIEGVRNLVAHCGIALDEVLRMATLYPARAIGVDKHLGSIAPSKVANLTAFTHDFKIIKTIVNGDEVVDLSK

SEQ ID NO: 75739 - protein, 266 aa, Salmonella typhi
MRLIPLSTAEQVGKWAARHIVNRINAFKPTTDRPFVLGLPTGGTPLTAYKALVEMHKAGEVSFKHVVTFNMDEYVGLPKEHPESYHSFMHRNFFDHVDIPAENINLLNGNAPDIDAECRQYEEKIRSYGKIHLFMGGVGNDGHIAFNEPASSLASRTRIKTLTHDTRVANSRFFDGDVNQVPKYALTVGVGTLLDAEEVMILVLGHQKAQALQAAVEGNVNHMWTISCLQLHPKAVVVCDEPSTMELKVKTLKYFNELEAENIKGL

SEQ ID NO: 75740 - protein, 650 aa, Salmonella typhi
MNILGFFQRLGRALQLPIVVLPVAALLLRFGQPDLLNMPFIAQAGGSIFDNLALVFAIGVASSWSKDSAGAAALAGAVGYFVMTKAMVTINPEINMGVLAGIITGLVGGAVYNRWSGIKLPDFLSFFGGKRFVPIATGFFCLVLAAIFGYVWPPVQHGIHAGGEWIVSAGALGSGIFGFINRLLIPTGLHQVLNTIAWFQIGEFTNAAGTVFHGDINRFYAGDGTAGMFMSGFFPIMMFGLPGAALAMYFAAPKERRPMVGGMLLSVAITAFLTGVTEPLEFLFMFLAPLLYLLHAILTGISLFVATLLGIHAGFSFSAGAIDYVLMYNLPAASNNVWMLLVMGVVFFIIYFLLFSAVIRMFNLKTPGREDKVDEMVTEEANSNTEEGLTQLATSYIAAVGGTDNLKAVDACITRLRLTVNDSARVNDAACKRLGASGVVKLNKQTIQVIVGAKAESIGDEMKKVVARGPVAAASADAAHVATPAPAAKPQAVPNAVTIAELVSPITGEVVALDQVPDEAFASKAVGDGVAVKPTDKTVVSPAAGTIVKIFNTNHAFCLETEKGAEIVVHMGIDTVALNGQGFKRLVEEGAEVTAGQPVLELDLDFLNANARSKISPVVCSNSDDFSALVIKADGHVVAGQTPLYEIKSK

SEQ ID NO: 75741 - protein, 555 aa, Salmonella typhi
MSEAEARPTNFIRQIIDEDLASGKHTTVHTRFPPEPNGYLHIGHAKSICLNFGIAQDYQGQCNLRFDDTNPVKEDIEYVDSIKNDVEWLGFHWSGDIRYSSDYFDQLHAYAVELINKGLAYVDELTPEQIREYRGTLTAPGKNSPFRDRSVEENLALFEKMRTGGFEEGKACLRAKIDMASPFIVMRDPVLYRIKFAEHHQTGTKWCIYPMYDFTHCISDALEGITHSLCTLEFQDNRRLYDWVLDNITIPVHPRQYEFSRLNLEYTVMSKRKLNLLVTDKHVEGWDDPRMPTISGLRRRGYTAASIREFCKRIGVTKQDNTIEMASLESCIREDLNENAPRAMAVIDPVKLVIENYPQGESEMVTMPNHPNKPEMGSREVPFSGEIWIDRADFREEANKQYKRLVMGKEVRLRNAYVIKAERVEKDAEGNITTIFCTYDADTLSKDPADGRKVKGVIHWVSVAHALPIEIRLYDRLFSVPNPGAAEDFLSVINPESLVIKQGYGEPSLKAAVAGKAFQFEREGYFCLDSRYATADKLVFNRTVGLRDTWAKAGE

SEQ ID NO: 75742 - protein, 122 aa, Salmonella typhi
MWLLDQWAERHIIEAQRKGEFDNLPGRGEPLILDDDSHVPAELRAGYRLLKNAGCLPPELEQRRDAIQLLDILNSIREDDPQYHQVSRQLSLLELKLRQAGLSTDFLHGEYAEKLLHKINDN

SEQ ID NO: 75743 - protein, 458 aa, Salmonella typhi; identical to SEQ ID NO: 75125

SEQ ID NO: 75744 - protein, 429 aa, Salmonella typhi
MKKQNNLRSLAAQAVELVVEQGQSLSNVLPPLQQKVADKDKALLQELCFGVLRTLSQLEWLINKLMSRPMTGKQRTVHYLIMVGFYQLLYTRVPPHAALAETVEGAVSIKRPQLKGLINGVLRQFQRQQETLLNEFATSDARFLHPGWLVKRLQNAYPTQWQRIIEANNQRPPMWLRVNRTHHTRDGWLGLLEDAGMKGYPHPDYPDAVRLETPAPVHALPGFAEGWVTVQDASAQGCAVFLAPQNGEHILDLCAAPGGKTTHILEVAPEADVLAVDIDEQRLSRVYDNLKRLGMKATVKQGDGRYPAQWCGEQQFDRILLDAPCSATGVIRRHPDIKWLRRDRDIAELAQLQAEILDAVWPRLKPGGTLVYATCSVLPEENRDQIKAFLQRTPDAALSETGTPDQPGQQNLPGGEEGDGFFYAKLIKK

SEQ ID NO: 75745 - protein, 97 aa, Salmonella typhi
MAKEQTDRTTLDLFAHERRPGRPKTNPLSRDEQLRINKRNQLKRDKVRGLKRVELKLNAQAVDALNELAEARNISRSELIEEILMKQLMALRGQGLV

SEQ ID NO: 75746 - protein, 256 aa, Salmonella typhi
MKLNIRAQSAQNLHNNSPIVLVHGLFGSLDNLGVLARDLVTDHDIIQVDMRNHGLSPRDPVMDYPAMAQDLLDTLDAQQIEKATFIGHSMGGKAVMALTALAPDRIDRLVAIDIAPVDYHVRRHDRIFAAINAVSESDATSRQQAAGIMRQHLNKEGVIQFLLKSWAEGEWRFNVPVLWEQYPHIVGWETIPPWEHPALFIPGGNSPYVTEAYRDALLAQFPLARAHVIAGAGHWVHAEKPEAVLRAIRRYLHDKR

SEQ ID NO: 75747 - protein, 161 aa, Salmonella typhi
MSNPEREVTDIAEILAILSKHEVCRIGFNDNLCPYVVPVNFGYEYQNGRWIFYFHGARTGKKMRLLRKNPAVCIEMDGDHALLRADDPCDYSYAYTSVFATGLASILQTREEMRHGLDVIMRQTDPGKTFSYREDMMKAVCVVRIECDALTCRRHLATQSE

SEQ ID NO: 75748 - protein, 272 aa, Salmonella typhi
MEAYAVFGNPIAHSKSPFIHQQFAQQLDIVHPYGRVLAPINNFINTLDAFFAAGGKGANITVPFKEEAFARSDELTERASLAGAVNTLKRLEDGRLLGDNTDGIGLLSDLERLNFIRPGLRILLIGAGGASRGVLLPLLSLDCAVTITNRTASRAEALAKIFAHTGSVHAMDMDKLDGCEFDLIINATSSGIRGEIPAIPASLIHPSLCCYDMFYQKGNTPFLSWCVQQGAKRYADGLGMLVGQAAHAVLLWHGVLPQVEPVIKLLQQELLA

SEQ ID NO: 75749 - protein, 902 aa, Salmonella typhi
MNDEPLRPDPDRLLEQTPPPHRGKLKIFFGACAGVGKTWAMLAQAQRLRAQGLDVVIGVVETHGRKETAALLDGLTILPPKRHSHRGRQIREFDLDAALARRPALILMDELAHSNAPGSRHPKRWQDIEELLEAGIDVFTTVNVQHLESLNDVVSGVTGIQVRETVPDPFFDAADEVVLVDLPPDDLRQRLNEGKVYIAGQAERAIEHFFRKGNLIALRELALRRTADRVDDQMRAWRAHPGEEKVWHTRDAILLCIGHNTGSEKLVRTAARLASRLGSVWHAVYVETPTLHRLPEKQRRAILSALRLAQELGAETATLSDPAEEKAVVRYAREHNLGKIVMGRPASRRWWRRDAFADRLARRAPDLDQVIVALEEPPARALAQTPDNRPFKEKWRGQIQGCLVAVALCAITTFIAMQWLVTFDAANLVMLYLLGVVVIALLYGRWPSVVATVINVASFDLFFIAPRGTLAVSDVQYLLTFAVMLTVGLVIGNLTAGVRYQARVARYREQRTRHLYEMSKALAVGRSEHDIAATSERFIASTCQARSQILLPDTNGKLLPLTHQQGMTPWDDAIARWSFDKGQPAGAGTDTLPGVPYQILPLKSADKTYGLAIVEPGNLRQLMVPEQQRLLETFTLLVANALERLTLTASEEQARLASEEQARLASERESIRNALLAALSHDLRTPLTVLFGQAEILTLDLASAGSPHARQASEIRQHILNTTRLVNNLLDMARIQSGGFNLKKEWLTLEEVVGSALQMLEPGLLHPITLSLPQQLTLIHVDGPLFERVLINLLENAVKYAGPQASIGIDAAVKDNRLQLDVWDNGPGIPAGQEQKIFDKFARGNKESAVPGVGLGLAICHAIVEVHGGTLTAYNRPQGGACFRVTLPQGKPPELDDFHEDM

SEQ ID NO: 75750 - protein, 195 aa, Salmonella typhi
MMIGLRPAFSTMLFLLLLTGGVYPLLTTALGQWWFPWQANGSLIHKDNLIRGSALIGQSFTAAGYFHGRPSATADTPYNPLASGGSNLAASNPELDAQIQARVAALRAANPQASSAVPVELTTASASGLDNNLTPGAAAWQIPRVAAARQLPVEQVAQLVAEYTHRPLASFLGQPVVNIVELNLALDALQGHRAK

SEQ ID NO: 75751 - protein, 569 aa, Salmonella typhi
MSRKQLALFEPVLLVQALTDAVKKLSPRAQWRNPVMFVVWAGSVLATLLTLAMVTGQIAGSALFTGVISLWLWFTVLFANFAEALAEGRSKAQANSLKGVKKTAFARRLRAPRHDAQADNVPAAELRKGDIVLVKAGDIIPCDGEVIEGGASVDESAITGESAPVIRESGGDFASVTGGRAVEAAGDVDVLLLDKTGTITLGNRQASDFIPARGVDERTLADAAQLASLADETPEGRSIVILAKQRFNLRERDVQSLHATFVPFTAQSRMSGINIDNRMIRKGSVDAIRRHVESNGGHFPADVEQNVENVARLGATPLVVVEGARVLGVIALKDIVKGGIKERFAQLRKMGIKTVMITGDNRLTAAAIAAEAGVDDFLAEATPEAKLALIRQYQAEGRLVAMTGDGTNDAPALAQADVAVAMNSGTQAAKEAGNMVDLDSNPTKLIEVVHIGKQMLMTRGSLTTFSIANDVAKYFAIIPAAFAATYPQLNALNVMGLHSPNSAILSAVIFNALIIIFLIPLALKGVSYKPLSASAMLRRNLWIYGLGGLVVPFIGIKVIDVLLTLLDLA

SEQ ID NO: 75752 - protein, 434 aa, Salmonella typhi
MKTRTQQIEELQKEWTQPRWEGITRPYSAEEVVKLRGSVNPECTLAQLGAAKMWRLLHGEAKKGYINSLGALTGGQALQQAKAGIEAIYLSGWQVVADANLASSMYPDQSLYPANSVPAVVDRINNTFRRADQIQWASGIEPNDPRYVDYFLPIVADAEAGFGGVLNAFELMKSMIEAGAAAVHFEDQLASVKKCGHMGGKVLVPTQEAIQKLVAARLAADVMGVPTLVIARTDADAADLITSDCDPYDSGFITGERTSEGFYRTHAGIEQAISRGLAYAPYADLVWCETSTPDLELARRFADAIHAKYPGKLLAYNCSPSFNWQKNLDDKTIASFQQQLSDMGYKYQFITLAGIHSMWFNMFDLAHAYAQGEGMKHYVEKVQQPEFAAAKDGYTFVSHQQEVGTGYFDKVTTIIQGGASSVTALTGSTEESQF

SEQ ID NO: 75753 - protein, 274 aa, Salmonella typhi
MVAPVPAKRGRKPAATTAPVTGQVQSLTRGLKLLEWIAESNGSVALTELAQQAGLPNSTTHRLLTTMQQQGFVRQVGELGHWAVGAHAFIVGSSFLQSRNLLAIVHPILRKLMEDSGETVNLAVLDQSDHQAIIIDQVQCTQLMRMSAPIGGKLPMHASGAGKAFLSQLSEEQVTSLLHRKGLHAYTHATLVSPLHLKDDLAQTRKRGYSFDDEEHALGLRCVASCIYDEHREPFAALSISGPCSRITDDRVTELGAMVIKAAKEVTLAYGGFR

SEQ ID NO: 75754 - protein, 1227 aa, Salmonella typhi
MSSKVEQLRAQLNERILVLDGGMGTMIQSYRLHEEDFRGERFADWPCDLKGNNDLLVLSKPEVIAAIHNAYFEAGADIIETNTFNSTTIAMADYRMESLSAEINYAAAKLARACADEWTARTPEKPRFVAGVLGPTNRTASISPDVNDPAFRNITFDQLVAAYRESTKALVEGGADLILIETVFDTLNAKAAVFAVKEEFEALGVDLPIMISGTITDASGRTLSGQTTEAFYNSLRHAEALTFGLNCALGPDELRQYVQELSRIAECYVTAHPNAGLPNAFGEYDLDADTMAKQIREWAEAGFLNIVGGCCGTTPEHIAAMSRAVAGLSPRQLPDIPVACRLSGLEPLNIGDDSLFVNVGERTNVTGSAKFKRLIKEEKYSEALDVARQQVESGAQIIDINMDEGMLDAEAAMVRFLSLIAGEPDIARVPIMIDSSKWEVIEKGLKCIQGKGIVNSISMKEGVEAFIHHAKLLRRYGAAVVVMAFDEQGQADTRERKIEICRRAYKILLEEVGFPPEDIIFDPNIFAVATGIEEHNNYAQDFIGACEDIKRELPHALISGGVSNVSFSFRGNDPVREAIHAVFLYYAIRNGMDMGIVNAGQLAIYDNLPAELRDAVEDVILNRRDDGTERLLDLAEKYRGSKTDEAASAQQAEWRSWDVKKRLEYSLVKGITEFIEQDTEEARQQAARPIEVIEGPLMDGMNVVGDLFGEGKMFLPQVVKSARVMKQAVAYLEPFIEASKEKGSSNGKMVIATVKGDVHDIGKNIVGVVLQCNNYEIVDLGVMVPAEKILRTAREVNADLIGLSGLITPSLDEMVNVAKEMERQGFTIPLLIGGATTSKAHTAVKIEQNYSGPTVYVQNASRTVGVVAALLSDTQRDDFVARTRKEYETVRIQHARKKPRTPPVTLEAARDNDLAFDWERYTPPVAHRLGVQEVEASIETLRNYIDWTPFFMTWSLAGKYPRILEDEVVGVEAQRLFKDANDMLDKLSAEKLLNPRGVVGLFPANRVGDDIEIYRDETRTHVLTVSHHLRQQTEKVGFANYCLADFVAPKLSGKADYIGAFAVTGGLKEDALADAFEAQHDDYNKIMVKAIADRLAEAFAEYLHERVRKVYWGYAPNESLSNDELIRENYQGIRPAPGYPACPEHTEKGTIWQLLDVEKHTGMKLTESFAMWPGASVSGWYFSHPESKYFAVAQIQRDQVTDYAFRKGMSVEDVERWLAPNLGYDAD

SEQ ID NO: 75755 - protein, 543 aa, Salmonella typhi
MLTLLHLLSAVALLVWGTHIVRTGVMRVFGARLRTVLSRSVEKKPLAFCAGIGVTALVQSSNATTLLVTSFVAQDLVALTPALVIVLGADVGTALMARILTFDLSWLSPLLIFIGVIFFLGRKQSRAGQLGRVGIGLGLILLALELIVQAVTPITQANGVQVIFASLTGDIMLDALIGAMFAIISYSSLAAVLLTATLTAAGIISFPVALCLVIGANLGSGLLAMLNNSAANAAARRVALGSLLFKLIGSLVILPFVHPLANLMDELPLPKSELVIYFHVFYNLVRCLAMVPFAELMARFCKRIIRDEPELDTHLKPKHLDVSALDTPTLALANAAREVLRIGDAMEQMMEGLKKVMHGEPREEKALRKLADDVNVLYTAIKLYLARMPKDELAAEESRRWAEIIEMALNLEQASDIIERMGSEIADKSLAARRAFSEEGLKELDALYDQLLSNLQLAMSVFFSGDVTSARRLRRSKHRFRILNRRCSHAHVDRLHQQNVQSIETSSLHLGLLGDMKRLNSLFCSVAYSVLEQPDQDEERGEY

SEQ ID NO: 75756 - protein, 244 aa, Salmonella typhi
MNIDLNADLGEGCASDSELLTLVSSANIACGFHAGDAQTMLTCVREALKNGVAIGAHPSFPDRDNFGRTAMVLPPETVYAQTLYQIGALGAIVQAQGGVMRHVKPHGMLYNQAAKDPHLAQAIAKAVHDYDPSLILVGLAGSELIRAGERHRLVTRQEVFADRGYQADGSLVPRMQPGALIHDEEQALAQTLDMVQAGRVKSVTGVWTTVTAQTVCIHGDGEYALAFARRLRAAFNARNVHVIA

SEQ ID NO: 75757 - protein, 364 aa, Salmonella typhi
MSANRVTKIMQRKKILIVGAGLSGAVIARQLAEQGHVVNIIDQRSHIGSNAYDARDEHTGIMVYVYGPHIFHTDNETVWNYVNKYAEMMPYINKVKATVNGQVFSLPINLHTINQFFGVACSPDDARKLLLQKCDSTILEPQNFEQQALRFIGKELYEAFFKGYTIKQWGLHPSALPASVLKRIPVRFNYDDNYFNHKFQGIPKFGYTQMVKSIVEHENIAVELCRSFTQEMRTNYDHVFFSGALDAFYSCQYGRLEYRTLDFKKIICQSDYQGCAVMNYCSIDTPYTRITEHKYFSPWERHEASICYQEYSRECEAGDIPYYPVRRADKMDLLNKYLSRAKKEKILLSLVVLALIVISIWTSR

SEQ ID NO: 75758 - protein, 549 aa, Salmonella typhi
MKNINPTQTSAWQALQKHYDEMKDVTIAELFANDSDRFAKFSATFDDLMLVDFSKNRITEETLAKLQDLAKETDLAGAIKSMFSGEKINRTEDRAVLHVALRNRSNTPIIVDGKDVMPEVNAVLEKMKTFSQAIISGQWKGYTGKAITDVVNIGIGGSDLGPFMVTEALRPYKNHLTMHFVSNVDGTHIAEVLKKVNPETTLFLVASKTFTTQETMTNAHSARDWFLKSAGDEKHVAKHFAALSTNAKAVGEFGIDTANMFEFWDWVGGRYSLWSAIGLSIILSVGFDNFVELLSGAHAMDKHFSTTPAEKNLPILLALIGIWYNNFFGAETEAILPYDQYMHRFAAYFQQGNMESNGKYVDRNGNAVDYQTGPIIWGEPGTNGQHAFYQLIHQGTKMVPCDFIAPAITHNPLSDHHQKLLSNFFAQTEALAFGKSREVVEQEYRDQGKDPAQLEHVVPFKVFEGNRPTNSILLREITPFSLGALIALYEHKIFTQGVILNIFTFDQWGVELGKQLANRILPELGDDKAISSHDSSTNGLINRYKAWRA

SEQ ID NO: 75759 - protein, 236 aa, Salmonella typhi
MKISCKNVGVILPIFNSSHRSFKKTFLQAASGGRIGSSNTGIIEVEALKKIDFTLTEGNRLALIGHNGSGKTTLLRVLAGAYKPTSGKYECIGRVTSLIDPMMGMDGELTGLENIKLRGLFLGLSKNEIKNITEDVIEFSELGDFIKIPVRTYSSGMVLRLGFSISTAINPEILLMDEWMSVGDSDFKRKAEMRLNSFISKAGIMVMATHDDELAKSVCNKFIRLEHSEIVSKGGF

SEQ ID NO: 75760 - protein, 427 aa, Salmonella typhi
MADTKAKITLTGDTAIELDVLKGTLGQDVIDIRSLGSKGVFTFDPGFTSTASCESKITFIDGDEGILLHRGFPIDQLATDSNYLEVCYILLYGEKPTQEEYDEFRTTVTRHTMIHEQITRLFHAFRRDSHPMAVMCGITGALAAFYHDSLDVNNPRHREIAAFRLLSKMPTMAAMCYKYSIGQPFVYPRNDLSYAGNFLNMMFSTPCETYEVNPVLERAMDRILILHADHEQNASTSTVRTAGSSGANPFACIAAGIASLWGPAHGGANEAALKMLEEISSVKHIPEFVRRAKDKNDSFRLMGFGHRVYKNYDPRATVMRETCHEVLKELGTKDDLLEVAMGLEHIALNDPYFIEKKLYPNVDFYSGIILKAMGIPSSMFTVIFAMARTVGWIAHWNEMHTDGMKIARPRQLYTGYDKRDFKSALKR

SEQ ID NO: 75761 - protein, 588 aa, Salmonella typhi
MKLPVREFDAVVIGAGGAGMRAALQISQSGQTCALLSKVFPTRSHTVSAQGGITVALGNTHEDNWEWHMYDTVKGSDYIGDQDAIEYMCKTGPEAILELEHMGLPFSRLDDGRIYQRPFGGQSKNFGGEQAARTAAAADRTGHALLHTLYQQNLKNHTTIFSEWYALDLVKNQDGAVVGCTALCIETCEVVYFKARATVLATGGAGRIYQSTTNAHINTGDGVGMALRAGVPVQDMEMWQFHPTGIAGAGVLVTEGCRGEGGYLLNKHGERFMECYAPNAKDLAGRDVVARSIMIEIREGRGCDGPWGPHAKLKLDHLGKEVLESRLPGILELSRTFAHVDPVKEPIPVIPTCHYMMGGIPTKVTGQALTVNEQGEDVVIPGLFAVGEIACVSVHGANRLGGNSLLDLVVFGRAAGLHLQESIAEQGVLRDASESDVEGSLDRLNRWNNNRNGEDPVAIRKALQECMQHNFSVFREGDAMAKGLEQLKVIRERLKNARLDDTSSEFNTQRVECLELDNLMETAYATAVSANFRTESRGAHSRFDFPERDDANWLCHTLYQPQTESMTRRSVNMEPKLRPAFPPKIRTY

SEQ ID NO: 75762 - protein, 396 aa, Salmonella typhi
MKIKTGVGILALSALTTMMISAPALAKIEEGKLVIWINGDKGYNGLAEVGKKFEQDTGIKVTVEHPDKLEEKFPQVAATGDGPDIIFWAHDRFGGYAQSGLLAEVTPDKAFQDKLYPFTWDAVRYNGKLIAYPIAVEALSLIYNKDLVPNPPKTWEEIPALDKELKAKGKSAIMFNLQEPYFTWPLIAADGGYAFKFENGKYDVKDVGVDNAGAKAGLTFLIDMIKNKNMSADTDYSIAEAAFNKGETAMTINGPWAWSNIDKSKVNYGVTLLPTFKGKPSKPFVGVLSAGINAASPNKELAKEFLENYLLTDQGLEAVNKDKPLGAVALKSFQEQLAKDPRIAATMDNAQKGEIMPNIPQMSAFWYAVRTAVINAASGRQTVDAALKDAQSRITK

SEQ ID NO: 75763 - protein, 369 aa, Salmonella typhi
MASVQLRNVTKAWGDVVVSKDINLDIHDGEFVVFVGPSGCGKSTLLRMIAGLETITSGDLFIGETRMNDIPPAERGVGMVFQSYALYPHLSVAENMSFGLKLAGAKKEVMNQRVNQVAEVLQLAHLLERKPKALSGGQRQRVAIGRTLVAEPRVFLLDEPLSNLDAALRVQMRIEISRLHKRLGRTMIYVTHDQVEAMTLADKIVVLDAGRVAQVGKPLELYHYPADRFVAGFIGSPKMNFLPVKVTATAIEQVQVELPNRQQIWLPVESRGVQVGANMSLGIRPEHLLPSDIADVTLEGEVQVVEQLGHETQIYIQIPAIRQNLVYRQNDVVLVEEGATFAIGLPPERCHLFREDGSACRRLHQEPGV

SEQ ID NO: 75764 - protein, 452 aa, Salmonella typhi
MMITLRKLPLAVAVAAGVMSAQAMAVDFHGYARSGIGWTGSGGEQQCFQVTGAQSKYRLGNECETYAELKLGQEVWKEGDKSFYFDTNVAYSVNQQNDWESTDPAFREANVQGKNLIEWLPGSTIWAGKRFYQRHDVHMIDFYYWDISGPGAGIENIDLGFGKLSLAATRSTEAGGSYTFSSQNIYDEVKDTANDVFDVRLAGLQTNPDGVLELGVDYGRANTTDGYKLADGASKDGWMFTAEHTQSMLKGYNKFVVQYATDAMTTQGKGQARGSDGSSSFTEELPDGTKINYANKVINNNGDMWRILDHGAISLGDKWDLMYVGMYQNIDWDNNLGTEWWTVGVRPMYKWTPIMSTLLEVGYDNVKSQQTGDRNNQYKITLAQQWQAGDSIWSRPAIRIFATYAKWDEKWGYIKDGDNISRYAAATNSGISTNSRGDSDEWTFGAQMEIWW

SEQ ID NO: 75765 - protein, 933 aa, Salmonella typhi
MQNSALKAWLDSSYLSGSNQSWIEQLYEDFLTDPDSVDANWRLTFQQLPGTGVKPDQLHSKTREYFRRQALAGSRHSSTISDPDTNVKQVKVLQLINAYRFRGHQHANLDPLGLWKQERVADLDPSFHDLTEADFQETFNVGSFASGKETMKLGELLDALKQTYCGPIGAEYMHITSTEEKRWIQQRIESGRAAFSADEKKRFLNELTAAEGLERYLGAKFPGAKRFSLEGGDALIPMLKEMVRHAGNSGTREVVLGMAHRGRLNVLINVLGKKPQDLFDEFAGKHKEHLGTGDVKYHMGFSSDIETEGGLVHLALAFNPSHLEIVSPVVMGSVRARLDRLDEPSSNKVLPITIHGDAAVTGQGVVQETLNMSKARGYEVGGTVRIVINNQVGFTTSNPLDARSTPYCTDIGKMVQAPIFHVNADDPEAVAFVTRLALDFRNTFKRDVFIDLVCYRRHGHNEADEPSATQPLMYQKIKKHPTPRKIYADKLEADKVATLEDATEMVNLYRDALDAGECVVKEWRPMNMHSFTWSPYLNHEWDEAYPNKVEMKRLQELAKRISTVPEAIEMQSRVAKIYGDRQAMAAGEKLFDWGGAENLAYATLVDEGIPVRLSGEDSGRGTFFHRHAVIHNQTNGSTYTPLQHIHSGQGQFKVWDSVLSEEAVLAFEYGYATAEPRTLTIWEAQFGDFANGAQVVIDQFISSGEQKWGRMCGLVMLLPHGYEGQGPEHSSARLERYLQLCAEQNMQVCVPSTPAQVYHMLRRQALRGMRRPLVVMSPKSLLRHPLAVSTLDELANGSFQPAIGEIDELDPKAVKRVVMCSGKVYYDLLEQRRKNDQKDVAIVRIEQLYPFPHKAVQEALQPYAHVHDFVWCQEEPLNQGAWYCSQHHFREVIPFGAALRYAGRPASASPAVGYMSVHQKQQQDLVNDALNVD

SEQ ID NO: 75766 - protein, 289 aa, Salmonella typhi
MSVLINKDTNVICQGFTGSQGTFHSEQAIAYGTQMVGGVTPGKGGTTHLGLPVFNTVREAVEATGATASVIYVPAPFCKDSILEAIDAGIKLIITITEGIPTLDMLTVKVKLDEAGVRMIGPNCPGVITPGECKIGIMPGHIHKPGKVGIVSRSGTLTYEAVKQTTDYGFGQSTCVGIGGDPIPGSNFIDILKLFQEDPQTEAIVMIGEIGGSAEEEAAAYIKDHVTKPVVGYIAGVTAPKGKRMGHAGAIIAGGKGTADEKFAALEAAGVKTVRSLADIGEALKAIIK

SEQ ID NO: 75767 - protein, 522 aa, Salmonella typhi
MLDIVELSRLQFALTAMYHFLFVPLTLGMAFLLAIMETVYVLSGKQIYKDMTKFWGKLFGINFALGVATGLTMEFQFGTNWSYYSHYVGDIFGAPLAIEGLMAFFLESTFVGLFFFGWDRLSKVQHMCVTWLVALGSNLSALWILVANGWMQNPIAADFNFETMRMEMVSFSELVLNPVAQVKFVHTVASGYVTGAMFILGISAYYMLKGRDFAFAKRSFAIAASFGMAAVLSVIVLGDESGYEMGDVQKTKLAAIEAEWETQPAPASFTLFGIPDQDKQENHLAIQIPYALGIIATRSVDTPVIGLKDLMVQHEERIRNGMKAYELLEQLRAGSTDQAVRDQFNSMKKDLGYGLLLKRYTPNVTDATEAQIQQATKDSIPRVAPLYFAFRIMVACGFLLLAIIALSFWSVIRNRIGEKKWLLRAALYGIPLPWIAVEAGWFVAEYGRQPWAIGKVLPTAVANSSLTVGDLLFSMFLICGLYTLFLVAELFLMFKFARLGPSSLKTGRYHFEQSTVTSQPAR

SEQ ID NO: 75768 - protein, 122 aa, Salmonella typhi; identical to SEQ ID NO: 43715

SEQ ID NO: 75769 - protein, 70 aa, Salmonella typhi; identical to SEQ ID NO: 73412

SEQ ID NO: 75770 - protein, 332 aa, Salmonella typhi
MQPETQSSALPAYRFSIAPMLDWTDRHCRYFLRLLSRQTLLYTEMVTTGAIIHGKGDYLAYSEEEHPVALQLGGSDPAQLAHCAKLAEARGYDEINLNVGCPSDRVQNGMFGACLMGNAQLVADCVKAMRDVVSIPVTVKTRIGIDDQDSYAFLCDFINTVSGQGECEMFIIHARKAWLSGLSPKENREIPPLDYPRVYQLKRDFPHLTMSINGGIKSLEEAKEHLRHMDGVMVGREAYQNPGILAAVDREIFGADTTDTDPVAVVRAMYPYIERELSQGAYLGHITRHMLGLFQGIPGARQWRRYLSENAHKAGADAAVLEQALKLIADKR

SEQ ID NO: 75771 - protein, 471 aa, Salmonella typhi; identical to SEQ ID NO: 73265

SEQ ID NO: 75772 - protein, 376 aa, Salmonella typhi
MSKATEQNDKLKRAIIISAVLHIILFAVLIWSSFDEHIEASAGGGGGSAIDAVMVDPGAVVQQYNRQQDQQASARGAEEERKKLQQQQAEELQQKQAAEQERLKQLEKERLAAQEQQKQAEEAAKLAQQQQQAEEAAKAAADAKKKAEAEAAKAAADAKKKAEAEAAKAAADAKKKAEAEAAKAAAEAKKKAEAEAAKAAADAKKKADAEAAKAAAEAKKKADAAAAKAAADAKKKAAAEKAAAAEGVDDLLGDLSSGKNAPKTGGGAKGNGQPSKDSGTSGANGGTTGADISAYAKQIQVAIQSRLYDASLYQGKQCVLHISLAPDGSLKSITSEGGDPALCQAALMATKTAKIPKPPSQAVYEKIKDAKLDFKL

SEQ ID NO: 75773 - protein, 262 aa, Salmonella typhi
MSSNFRHHLLSLSLLVGIAAPWAAFAQAPISSVGSGSVEDRVTQLERISNAHSQLLTQLQQQLSDNQSDIDSLRGQIQENQYQLNQVMERQKQIMLQLGSLNNGGAAQPAAGDQSGAATAATPAPDAGTATSGAPVQSGDANTDYNAAIALVQDKSRQDDAIVAFQNFIKKYPDSTYQPNANYWLGQLNYNKGKKDDAAYYFASVVKNYPKSPKAADAMYKVGVIMQDKGDTAKAKAVYQQVINKYPGTDGAKQAQKRLNAM

SEQ ID NO: 75774 - protein, 257 aa, Salmonella typhi
MAHSWLRLVAGATLSFVIAGHALADEGKITVFAAASLTNAMQDIAAEYKKEKNVDVVSSFASSSTLARQIEAGAPADLFISADQKWMDYAADKKAVDTTTRETLLGNSLVVVAPKASEQKPFTIDNKTDWIHLLNGGRLAVGDPQHVPAGIYAKEALQKLGAWQTLEPKLAPGEDVRGALALVERNEAPLGIVYGSDAVASKGVNVVATFPEDSHKKVEYPIAIVEGHKNAAVSAFYDYLKGPQASAIFKRYGFTTK

SEQ ID NO: 75775 - protein, 387 aa, Salmonella typhi; identical to SEQ ID NO: 73063

SEQ ID NO: 75776 - protein, 233 aa, Salmonella typhi
MTTLSCKVTSVEAITDTVYRVRLVPDAAFSFRAGQYLMVVMDERDKRPFSMASTPDEKGFIELHIGASELNLYAMAVMDRILKDREIVVDIPHGDAWLRDDEERPLILIAGGTGFSYARSILLTALARNPARDVTIYWGGREEKHLYDLSELEALSVNHPNLRIEPVVEQPEEGWRGRTGTVLTAVLQDYGTLAGHDIYIAGRFEMAKIARDLFCHERNAREDRLFGDAFAFI

SEQ ID NO: 75777 - protein, 251 aa, Salmonella typhi; identical to SEQ ID NO: 73251

SEQ ID NO: 75778 - protein, 771 aa, Salmonella typhi
MNGWRGKRGRWLWLAGAPLFIFLALWAADKLWPLPLNEVHPARVVVAHDGTPLWRFADAGGIWRYPVTIEEVSPRYLEALINYEDRWFWQHPGVNPFSVARAAWQDLTAGRVISGGSTLTMQVARLLDPHSRTFGGKIRQLWRALQLEWHLSKRDILTLYLNRAPFGGTLQGIGAASWAYFGKPPARLSYADAALLAVLPQAPSRLRPDRWPTRAEAARNKVLDRMAEQGVWPAETVRESREEPVWLAPRQMPQLAPLFARMMLSKSRSDKIVTTLDAGLQRQLEDLARAWKGRLPARSSLAMIVVDHTDMSVRGWVGSVDLNDDSRFGHVDMVTAIRSPGSVLKPFVYGLALDDGLIHPASLLQDVPRRTGDYRPGNFDSGFHGPVSMSDALVRSLNLPAVQVLEAYGPKRFAAKLRNVGLPLYLPAGAAPNLSLILGGAGARLDEMAAAYSAFARHGKAAKLRLQPDDPLSERPLMSPGAAWIIRRIMADEAQPLPDNALPRIVPLAWKTGTSYGYRDAWAIGVNARYIIGIWTGRPDGTPVVGQFGFASAVPLLNQVNNLLLAHTGRLPEDPRPQTVSRGVICWPGGQTLPAGNSNCRRRLATWLLDDSQPPTLLLPEQEDINGIRFPVWLDDTGRRVAADCPQARAHTFIVWPRPLEPWLPPAERRSARLPAASDHCPPLQGNDAAPLMLSGVRDGAVIRQLPGQENVTLPVSTTGGKGRRWWFLNGEPVNGENNRLSLLLNIAGRYQLVVMDESGQVAAVNFELIR

SEQ ID NO: 75779 - protein, 261 aa, Salmonella typhi
MIPMSETKNELEILLEKAATEPAHRSAFFRTLLESTVWVPGSAAEGEAIVEDSALDLQHWEKEDGTTVIPFFTSLEALQQAVEDEQAFVVMPARTLFEMTLGETLFLNAKLPTGKEFMPREISLLLAEEGSPLSTQEVLEGGESLILSEVAEPPSQMIDSLTTLFKTIKPVKRAFLCAIKEHADAQPNLLIGIEADGEIEEIIHAAGNVATDTLPGDEPIDICQVRKGAQGISHFITEHIAPFYERRWGGFLRDFKQNRII

SEQ ID NO: 75780 - protein, 266 aa, Salmonella typhi; identical to SEQ ID NO: 43716

SEQ ID NO: 75781 - protein, 338 aa, Salmonella typhi
MFQQQNDWETRENAFAAFAMGPLTDFWRQREEAEFIGVDNIPVRFVRFRNDSNDRTIVICPGRIESYVKYAELAYDLFHLGFDIFIIDHRGQGRSGRMLSDPHRGHVDHFNDYVEDLAAFWQQEIEPGSWRKRYILAHSMGGAIATLFLQRHRVRCDAIALTAPMFGIVIRLPSFMVRHILDWAEGHQRIREDYAIGTGQWRALPFGMNALTHSRQRYQRNLRFYADEPQLRVGGPTWHWVREGILAGEQVLAGASDDTTPTLLIQAEEERVVDNRTHDRFCEIRAAAGYPCEGGKPLVIKGAYHEILFEKDAMRSVALNAIVEFFNKPNLSSGNRFA

SEQ ID NO: 75782 - protein, 206 aa, Salmonella typhi
MTFEWWFAYLLTSTLLSLSPGSGAINTMTTSINHGYRGAAASIAGLQTGLGIHIVLVGVGLGTLFSRSLIAFEILKWAGAAYLIWLGIQQWRAAGAIDLHTLAQTQSRGRLFKRAIFVNLTNPKSIVFLAALFPQFIMPQQPQLAQYLILGVTTIVVDMIVMTGYATLAQRIAAWIKGPKQMKALNKAFGSLFMLVGALLASARHA

SEQ ID NO: 75783 - protein, 609 aa, Salmonella typhi
MAQAEVLNLESGAKQVLQETFGYQQFRPGQEAIIDTALSGRDCLVVMPTGGGKSLCYQIPALLLDGLTVVVSPLISLMKDQVDQLLANGVAAACLNSTQSREQQLEVMAGCRTGQIRLLYIAPERLMLDNFLDHLAHWNPVLLAVDEAHCISQWGHDFRPEYAALGQLRQRFPALPFMALTATADDTTRQDIIRLLGLNDPLIQISSFDRPNIRYMLMEKFKPLDQLMRYVQEQRGKSGIIYCNSRAKVEDTAARLQSRGISAAAYHAGLENAIRADVQEKFQRDDLQIVVATVAFGMGINKPNVRFVVHFDIPRNIESYYQETGRAGRDGLPAEAMLFYDPADMAWLRRCLEEKPAGQLQDIERHKLNAMGAFAEAQTCRRLVLLNYFGEGRQEPCGNCDICLDPPKQYDGLNDAQIALSTIGRVNQRFGMGYVVEVIRGANNQRIRDFGHDKLKVYGMGREKSHEHWVSVIRQLIHLGLVMQNIAQHSALQLTDAARPVLRGDVPLKLAVPRIVALKPRVMQKSFGGNYDRKLFAKLRKLRKAIADEENIPPYVVFNDATLIEMAEQMPVSASEMLSVNGVGMRKLERFGKEFMALIRAHVDGDDEE

SEQ ID NO: 75784 - protein, 272 aa, Salmonella typhi
MSHCSCHDKPQHSLLPAAYRILSITRHTPLEWNFRVAVDFPAHWGQFVEVSLPRVGEAPISVSDYGDGWIDLLIRNVGKVTSALFTLKEGDNVWLRGCYGNGYPVDTLRHKPLLVVAGGTGVAPVKGLMRYFVENPQEIGQLDMILGYKNRDCVLYKEEMATWHGKHNLVLTLDEGEADDRYQIGRVTDRLADMTLSDIDTMQAIVVGPPIMITFTVKMLLQKGLKPEQIWVDYERRMACSVGKCGHCRMGEVYVCTDGPIFNYAVAQRFAD

SEQ ID NO: 75785 - protein, 720 aa, Salmonella typhi
MDVSYLLDSLNDKQREAVAAPRSNMLVLAGAGSGKTRVLVHRIAWLLSVENNSPYSIMAVTFTNKAAAEMRHRIGQLMGTSQGGMWVGTFHGLAHRLLRAHHMDANLPQDFQILDSEDQMRLLKRLIKAMNLDEKQWPPRQAMWYINSQKDEGLRPHHIQSYGNPVEQTWQKVYQAYQEACDRAGLVDFAELLLRAHELWLNKPHILQHYRERFTNILVDEFQDTNNIQYAWVRLLAGDTGKVMIVGDDDQSIYGWRGAQVENIQRFLNDFPGAQTIRLEQNYRSTSNILSVANALIENNNGRLGKKLWTDGVDGEPISLYCAFNELDEARFVVNRIKTWQDNGGALAQCAILYRSNAQSRVLEEALLQASMPYRIYGGMRFFERQEIKDALSYLRLIANRNDDAAFERVVNTPTRGIGDRTLDVVRQTSRDRQLTLWQACRELLQEKALAGRAASALQRFMELIDALAQETADMPLHVQTDRVIKDSGLRTMYEQEKGEKGQTRIENLEELVTATRQFSYNDEDEDLMPLQAFLSHAALEAGEGQADTWQDAVQLMTLHSAKGLEFPQVFIVGMEEGMFPSQMSLDEGWRLEEERRLAYVGVTRAMQKLTLTYAETRRLYGKEVYHRPSRFIGELPEECVEEVRLRATVSRPVSHQRMGTPLAENDTGYKLGQRVRHAKFGEGTIVNLEGSGEHSRLQVAFQGQGIKWLVAAYAKLETV

SEQ ID NO: 75786 - protein, 238 aa, Salmonella typhi
MRFYRPLGRIAALTFDLDDTLYDNRPVILRTEQEALAFMQNYHPSLRSFQNVDLQRIRQAVREAEPEIYHDVTRWRHRAIEQAMRDAGLSAQESIAGANAAMMHFAKWRSQIEVPQATHETLQQLAKKWPLVAITNGNAQPELFGLGDYFKFVLRAGPDGRSKPFSDMYFLAAEKLHVPIGEILHVGDDLTTDVAGAIRCGMQACWIKPENADLMRTQDSRLLPHIEISRLASLTSLI

SEQ ID NO: 75787 - protein, 300 aa, Salmonella typhi
MTEVALSLDVSRFLRYLGVERQLSPITLQNYQRQLDAIIALAGETGLKSWQQCDAAIVRSFAVRSRRKGLGPASLALRLSALRSFFDWLVSQGELKANPAKGVSAPKAPRHLPKNIDVDDVNRLLDIDLNDPLAVRDRAMLEVMYGAGLRLSELVGLDIKHLDLDTGEVWVMGKGSKERRLPIGRNAVTWIEHWLDLRGLFASDEEALFLSKLGKRISARNVQKRFAEWGIKQGLNSHVHPHKLRHSFATHMLESSGDLRGVQELLGHANLSTTQIYTHLDFQHLASVYDAAHPRAKRGK

SEQ ID NO: 75788 - protein, 417 aa, Salmonella typhi
MLKREMNIADYDAELWQAMEQEKVRQEEHIELIASENYTSPRVMQAQGSQLTNKYAEGYPGKRYYGGCEYVDVVEQLAIDRAKELFGADYANVQPHSGSQANFAVYTALLQPGDTVLGMNLAQGGHLTHGSPVNFSGKLYNIVPYGIDESGKIDYDEMAKLAKEHKPKMIIGGFSAYSGVVDWAKMREIADSIGAYLFVDMAHVAGLIAAGVYPNPVPHAHVVTTTTHKTLAGPRGGLILAKGGDEELYKKLNSAVFPSAQGGPLMHVIAGKAVALKEAMEPEFKVYQQQVAKNAKAMVEVFLNRGYKVVSGGTENHLFLLDLVDKNLTGKEADAALGRANITVNKNSVPNDPKSPFVTSGIRIGSPAVTRRGFKEAEVKELAGWMCDVLDNINDEATIERVKAKVLDICARFPVYA

SEQ ID NO: 75789 - protein, 443 aa, Salmonella typhi
MSSVKKIGLFACTGVVAGNMMGSGIALLPANLASIGGIAIWGWVISIIGAMSLAYVYARLATKNPQQGGPIAYAGEISPAFGFQTGVLYYHANWIGNLAIGITAVSYLSTFFPALNNPIPAGIACIAIVWLFTFINMLGGAWVSRLTTIGLFLVLIPVVLTAVAGWHWFAIATYHANWNTSTTTDSHAIVKSILLCLWAFVGVESAAVSTGMVKNPKRTVPLATMLGTALAGIIYIAATQVIAGMFPASVMASSGAPFAISTSTILGGWAAPLVSAFTAFACLTSLGSWMMLVGQAGVRAANDGNFPKIYGEMDKNGIPKKGLLLAAVKMTALMILITIMNSSGGKASDLFGELTGIAVLLTMLPYFYSCVDLIRFEGFNIRNSVSLICSVLGCAFCFIALMGASSFELSGTFIVSLIILMFYGRKMHQRQNNDSDNNTAEAL

SEQ ID NO: 75790 - protein, 313 aa, Salmonella typhi
MLDNVLRIATRQSPLALWQAHYVKDALMATHPGLTVELVPMVTRGDVILDTPLAKVGGKGLFVKELEIALLEKRADIAVHSMKDVPVAFPDGLGLVTICEREDPRDAFVSNKYHSLDDLPAGSIVGTSSLRRQCQLAERRPDLIIRSLRGNVGTRLGKLDNGDYDAIILAVAGLKRLGLESRIRTALPPDVSLPAVGQGAVGIECRLDDARTQALLAPLNHSQTALRVTAERAMNTRLEGGCQVPIGSYAEIINGEIWLRALVGAPDGSVMVRGERRGSPEQAEQMGISLAEELLENGARAILTEVYNGETPA

SEQ ID NO: 75791 - protein, 461 aa, Salmonella typhi
MLAFLLILLPLLVLAWQAWQSLNALSDQAAVTNRSTLIDARRSEAMTNVALEMERSYRQYCVLDDPTLAKVYQSQRKRYSDMLDAHAGVLPDDKLYQALRQDLNALAQLQCKDSGPEAAAAARLEAFANANTEMVQATRTVVYSRGQQLQQEIAERGQFFGWQALVLFLVSLAMVLLFTRMIIGPVKGIERMINRLGEGRSLGNTVTFTGPRELRSVGQRIIWLSERLAWLESQRHQFLRHLSHELKTPLASMREGTELLADQVVGPLTPEQKEVVDILDDSSRNLQKLIEQLLDYNRKLVDSATELEAVDIAPLVDMVVSAHSLPARAKMMHTDVDLEAERCIAEPMLLMSVLDNLYSNAVHYGAESGNICIRSRSQGSTVYIDVVNSGEPIPQTEREMIFEPFFQGSHQRKGAVKGSGLGLSIARDCIRRMQGEIQLVDDKAQEVCFRISLPLPASDKH

SEQ ID NO: 75792 - protein, 1295 aa, Salmonella typhi
MMEILRGSPALSAFRINKLLARFQAANLQVHNIYAEYVHFADLNAPLNDSEQAQLTRLLQYGPALSSHTLAGKLLLVTPRPGTISPWSSKATDIAHNCGLQQIDRLERGVAYYIEASTLTAEQWRQVAAELHDRMMETVFSSLTDAEKLFIHHQPAPVSSVDLLGEGRQALIDANLRLGLALAEDEIDYLQEAFTKLGRNPNDIELYMFAQANSEHCRHKIFNADWIIDGKPQPKSLFKMIKNTFETTPDYVLSAYKDNAAVMEGSAVGRYFADHNTGRYDFHQEPAHILMKVETHNHPTAISPWPGAATGSGGEIRDEGATGRGAKPKAGLVGFSVSNLRIPGFEQPWEEDFGKPERIVTALDIMTEGPLGGAAFNNEFGRPALTGYFRTYEEKVNSHNGEELRGYHKPIMLAGGIGNIRADHVQKGEIVVGAKLIVLGGPAMNIGLGGGAASSMASGQSDADLDFASVQRDNPEMERRCQEVIDRCWQLGDANPILFIHDVGAGGLSNAMPELVSDGGRGGKFELRDILSDEPGMSPLEIWCNESQERYVLAVAADQLPLFDELCKRERAPYAVIGDATEEQHLSLHDNHFDNQPIDLPLDVLLGKTPKMTRDVQTLKAKGDALNRADITIADAVNRVLHLPTVAEKTFLVTIGDRTVTGMVARDQMVGPWQVPVADCAVTTASLDSYYGEAMSIGERAPVALLDFAASARLAVGEALTNIAATQIGDIKRIKLSANWMAAAGHPGEDAGLYDAVKAVGEELCPQLGLTIPVGKDSMSMKTRWQEGNEQREMTSPLSLVISAFARVEDVRHTLTPQLSTEDNALLLIDLGKGHNALGATALAQVYRQLGDKPADVRDVAQLKGFYDAMQVLVAARKLLAWHDRSDGGLLVTLAEMAFAGHCGVQVDIAALGDDHLAALFNEELGGVIQVRAEDRDAVETLLAQYGLADCVHYLGQALAGDRFVITANDRTVFSESRTTLRVWWAETTWQMQRLRDNPQCADQEHEAKANDADPGLNVKLSFDINEDIAAPYIATGARPKVAVLREQGVNSHVEMAAAFHRAGFDAIDVHMSDLLGGRIGLGNFHALVACGGFSYGDVLGAGEGWAKSILFNHRVRDEFETFFHRPQTLALGVCNGCQMMSNLRELIPGSELWPRFVRNHSDRFEARFSLVEVTQSPSLLLQGMVGSQMPIAVSHGEGRVEVRDDAHLAALESKGLVALRYVDNFGKVTETYPANPNGSPNGITAVTTENGRVTIMMPHPERVFRTVANSWHPENWGEDSPWMRIFRNARKQLG

SEQ ID NO: 75793 - protein, 228 aa, Salmonella typhi
MENQPKLNSSKEVIAFLAERFPHCFSAEGEARPLKIGIFQDLVERVGGEMNLSKTQLRSALRLYTSSWRYLYGVKPGATRVDLDGNPCGELEEQHVEHARKQLEEAKARVQAQRAEQQAKKREAAAAAGEKEDAPRRERKPRPVARRKEGAERKPRADKPTTKAPRAPREEKHTPVSDISVLTVGQSLKVKAGNNAMDATVLEITKDGVRVQLNSGMSLIVRAEHLVF

SEQ ID NO: 75794 - protein, 246 aa, Salmonella typhi
MTNNAAAPLYSLRGLPLIGWRDMSHALNYLFADGQLKQGTLVAINAEKLLTAEDNPEVRALIAAAEFKYADGISVVRSIRKKFPQAQVSRVAGADLWEALMARAGKEGTPVFFVGGKPEVLAQTEAKLRTQWNVNIVGSQDGYFTPEQRQALFARIHASGAKIVTVAMGSPKQELLMRDCREVHPHALYMGVGGTYDVFTGHVKRAPKIWQNLGLEWLYRLLSQPKRITRQMRLLRYLRWHYTGDL

SEQ ID NO: 75795 - protein, 475 aa, Salmonella typhi
MKKLKINYLFIGILTLLLAAALWPSIPWFGKTENHIAAIQARGVLRVSTIDSPLTYSVINGKKYGLDYELAQQFANYLGVKLKVTVRQNISQLFDDLDNGNADLLAAGLVYDSARVKNYQPGPMYYSVSQQLVYRVGQYRPRSLATVNENQLTIAPGHVVVNDLQRLKETKFPDLSWKVDDKKGSTTLLEEVISGKLDYTIADSVAISLFQRVHPELAVALDVTDEQPVTWFSRLDDDNTLSAALLDFFNSINEDGSLARIEEKYLGHGDDFDYVDTRSFLRAVDNVLPELEPLFKKYAKEIDWRLLAAISYQESHWDPLATSPTGVRGLMMLTKNTAQSLGLTDRTDAEQSISGGARYLEDMMAKVPETVPEDERIWFALAAYNMGYAHMLDARSLTVKTKGNPDSWTDVKQRLPLLSQKPYYSKLTYGYARGHEAYAYVENIRKYQISLVGYLQEKEKQEAEAMKLAQDYPAV

SEQ ID NO: 75796 - protein, 453 aa, Salmonella typhi
MDKTAALASDILRGIGGEQNILRLENCMTRVRVEVQDDSQLDIPRLKALPGVSGYVKQGEQHQLIVGPGKAAQVVDAMRVQIAAGGVKPDDAMARTKSEAKAKYKAPMSDALRKLANVFIPLIPAFIASGLITGIINILKRPDIVGDVAVHYPNLLGLMGIFGSAVFSIMNILVGVNTAKVFGGSQALGGVMAGILSSPQLAQITLFGEALQPGRGGVIAVLLVVALMCWIERQFRKLLPGSLELILNPLLTTVITGAVAIVALQPLGGWISDAIAHGASWAIDRGGFLVGAVLAGTFLPLVLIGLHQGLVPIHVELVQAHGYNALFPILAMAGVGQIGAAIAVLMKTRNARLKKVIKGALPVGLLGIGEPLIFGVTLPLGKPFIGACLGGAVGGALISYWKVATVITFGISGLPLALTIVAGKVLFYLLGYLIAVIAGFIFTWLLGFNDPEE

SEQ ID NO: 75797 - protein, 297 aa, Salmonella typhi
MNLGTLVSETRNPQTMDLDALSTPELVKRFNEQDTLVAEAVKATLPDVARAVDAAAAALKSGGRIIYMGAGTSGRLGVLDASECPPTFGVPHGLVVGLIAGGPGALLKAVEGAEDSQQAGEDDLVALNLQEQDLVVGLAASGRTPYVIGGLRYARQSGCTTVAVSCNPDSPIAREANIAISPVVGPEALTGSTRLKSGTAQKMVLNMISTGAMVKFGKVYQNLMVDMKATNVKLVDRACRMVVEATGIGREEAETLLKQTDFEVKPAILMALTGLDAAAAREKLAAHQGFLRAALEH

SEQ ID NO: 75798 - protein, 282 aa, Salmonella typhi
MNCLIRIRQRYPDLAQSDRKLADYLLAQPDTARHLSSQQLAAEAGVSQSSVVKFAQKLGFKGFPALKLAISEALASNPNPHSVPVHNQIRGDDPMRLVGEKLIKENVAAMHATLDVNSEEKLLESVTMLRHARRIVITGIGASGLVAQNFAWKLLKIGINAVVERDMHALLATVQALAPEDLLLAISYSGERRELNLAADETLRAGAKILAITGFSPNALQQRATRCLYTIAEEQATRSAAISSTHAQMMLTDLLFMALVQQDLERAPERIRHSEALVKKLV

SEQ ID NO: 75799 - protein, 131 aa, Salmonella typhi
MELQLMLNHFFERVRKDANFNAFLIDLEYNNIAYYIYFVATGNVKIITHAGHFISIKSNRKLIKVNSTPNTQLIKLTSAKHFSGEHSYEKYCTDLATAGVFKWIVELNKKTRQYWSKDNQLLYIENVVMPL

SEQ ID NO: 75800 - protein, 86 aa, Salmonella typhi
MALLITKKCINCDMCEPECPNEAISMGDSIYEINSDKCTECVGHYETPTCQKVCPIPNTILQDPAHVETEEQLWDKFVLMHHADKL

SEQ ID NO: 75801 - protein, 367 aa, Salmonella typhi
MKLLTALSELISIFLFTTIFIFLARKVAIKIGLVDKPNFRKRHQGVIPLVGGISVFAGICFMFGLSDYYIPHLSLYLICAGVLVFVGAMDDRFDISVKIRAVVQAVIAVVMMVIAKLHLGSLGYIFGPWELVLGPFGYFLTLFAVWAAINAFNMVDGIDGLLGGLSSVSFAAMGLILWFDGQTSLAMWCFAMIAAILPYIMLNLGILGRRYKVFMGDAGSTLIGFTVIWLLLETTQGKTHSISPVTALWIIAIPLMDMVAIMYRRLRKGMSPFSPDRQHIHHLVMRAGFTSRQAFVLITLAAAILAGVGVTAEYSHFVPEWVMLVLFLLAFFLYGYCIKRAWKVARFIKRVKRRLRRQRKNRPNLTK

SEQ ID NO: 75802 - protein, 126 aa, Salmonella typhi; identical to SEQ ID NO: 73373

SEQ ID NO: 75803 - protein, 419 aa, Salmonella typhi; identical to SEQ ID NO: 73456

SEQ ID NO: 75804 - protein, 301 aa, Salmonella typhi
MSTDKTYCGFIAIVGRPNVGKSTLLNKLLGQKISITSRKAQTTRHRIVGIHTEGPYQAIYVDTPGLHMEEKRAINRLMNKAASSSIGDVELVIFVVEGTRWTPDDEMVLNKLRDGKAPVILAVNKVDNVQEKADLLPHLQFLASQMNFLDIVPISAETGMNVDTIASIVRKHLPEAIHHFPEDYITDRSQRFMASEIIREKLMRFLGAELPYSVTVEIERFVTNERGGYDINGLILVEREGQKKMVIGNKGAKIKTIGIEARKDMQEMFEAPVHLELWVKVKSGWADDERALRSLGYVDDL

SEQ ID NO: 75805 - protein, 304 aa, Salmonella typhi
MRKVSISILFMLVSLTWGTTWLAMRIAVETIPPVFATGMRFMFAAPFLIIIAWLRKKNLLFPPGQRLFQFVICIFYFSIPFSLMIYGETYVNSGLAAIIFANMPVAVLIASVLFLNEKAKLMQIAGLTIAITALTGILLEETNTSTESHWQGITALISAVLIHAIIYTQCKKRSCTVSVITFNALPCLLAGLILSATGWFFERPQVSTFSVHSILATLYLGAFAGVFGILCYFALQQKANAFQASLVFLIFPLIAVSLEDYIYGYAISTHSMLLIIPLAIGIFLTLVARNIPVTSRCRDNSSQK

SEQ ID NO: 75806 - protein, 674 aa, Salmonella typhi
MRLNPGQQHAVEFVTGPCLVLAGAGSGKTRVITNKIAHLIRGCGYQARHIAAVTFTNKAAREMKERVGQTLGRKEARGLMISTFHTLGLDIIKREYAALGMKSNFSLFDDTDQVALLKELTEGLIEDDKVLLQQLISTISNWKNDLKTPAQAAAGAKGERDRIFAHCYGLYDAHMKACNVLDFDDLILLPTLLLQRNDEVRERWQNKIRYLLVDEYQDTNTSQYELVKLLVGQRARFTVVGDDDQSIYSWRGARPQNLVLLSQDFPALQVIKLEQNYRSSGRILKAANILIANNPHVFEKRLFSELGYGAELKVLSANNEEHEAERVTGELIAHHFVNKTQYKDYAILYRGNHQSRVFEKFLMQNRIPYKISGGTSFFSRPEIKDLLAYLRVLTNPDDDSAFLRIVNTPKREIGPATLQKLGEWAMTRNKSLFTASFDMGLSQKLTGRGYDSLTRFTHWLGEIQRLAEREPVAAVRDLIHGIDYESWLYETSPSPKAAEMRMKNVNQLFSWMTEMLEGNELDEPMTLTQVVTRFTLRDMMERGESEEELDQVQLMTLHASKGLEFLYVYMVGMEEGFLPHQSSIDEDNIEEERRLAYVGITRAQKELTFTLCKERRQYGELVRPEPSRFLLELPQDDLIWEQERKVVSAEERMQKGQSHLANLKAMMAAKRAKS

SEQ ID NO: 75807 - protein, 324 aa, Salmonella typhi
MANMFALILVIATLVTGILWCVDKFVFAPKRRARQAAAQTASGDALDNATLNKVAPKPGWLETGASVFPVLAIVLIVRSFLYEPFQIPSGSMMPTLLIGDFILVEKFAYGIKDPIYQKTLIETGHPKRGDIVVFKYPEDPKLDYIKRAVGLPGDKITYDPVAKEVTIQPGCSSGQACENALPVTYSNVEPSDFVQTFARRNGGEATSGFFEVPLNETKENGIRLTERKETLGDVTHRILMVPIAQDQLGMYYQQPGQPLATWVVPPGQYFMMGDNRDNSADSRYWGFVPEANLVGKAVAIWMSFDKQEGEWPTGVRLSRIGGIH

SEQ ID NO: 75808 - protein, 491 aa, Salmonella typhi
MANYFNTLNLRQQLAQLGKCRFMGRDEFADGASYLQGKKVVIVGCGAQGLNQGLNMRDSGLDISYALRKEAIAEKRASWRKATENGFKVGTYEELIPQADLVVNLTPDKQHSDVVRSVQPLMKDGAALGYSHGFNIVEVGEQIRKDITVVMVAPKCPGTEVREEYKRGFGVPTLIAVHPENDPKGEGMAIAKAWAAATGGHRAGVLESSFVAEVKSDLMGEQTILCGMLQAGSLLCFDKLVAEGTDPAYAEKLIQFGWETITEALKQGGITLMMDRLSNPAKLRAYALSEQLKEIMAPLFQKHMDDIISGEFSSGMMADWANDDKKLLTWREETGKTAFETAPQFEGKIGEQEYFDKGVLMIAMVKAGVELAFETMVDSGIIEESAYYESLHELPLIANTIARKRLYEMNVVISDTAEYGNYLFSYACVPLLKPFMAELQPGDLGSAIPEGAVDNAQLRDVNDAIRSHAIEQVGKKLRGYMTDMKRIAVAG

SEQ ID NO: 75809 - protein, 616 aa, Salmonella typhi
MPKYRSATTTHGRNMAGARALWRATGMTDSDFGKPIITVVNSFTQFVPGHVHLRDLGKLVAEQIEASGGVAKEFNTIAVDDGIAMGHGGMLYSLPSRELIADSVEYMVNAHCADAMVCISNCDKITPGMLMASLRLNIPVIFVSGGPMEAGKTKLSDQIIKLDLVDAMIQGADPKVSDDQSNQVERSACPTCGSCSGMFTANSMNCLIEALGLSQPGNGSLLATHADRKQLFLNAGKRIVELTKRYYEQDDESALPRNIANKAAFENAMTLDIAMGGSTNTVLHLLAAAQEAEIDFTMSDIDKLSRKVPQLCKVAPSTQKYHMEDVHRAGGVLGILGELDRAGLLNRNVKNVLGLTLPQTLEQYDITVTQDEAVKKMFRAGPAGIRTTQAFSQDCRWDSLDDDRAAGCIRSLEYAYSKDGGLAVLYGNFAENGCIVKTAGVDDSILKFTGPVKVYESQDDAVEAILGGKVVEGDVVVIRYEGPKGGPGMQEMLYPTSFLKSMGLGKACALITDGRFSGGTSGLSIGHVSPEAASGGTIALIEDGDTIAIDIPNRSIQLQLSEAEIAARREAQEARGDKAWTPKNRQRQVSFALRAYASLATSADKGAVRDKSKLGG

SEQ ID NO: 75810 - protein, 309 aa, Salmonella typhi; identical to SEQ ID NO: 74958

SEQ ID NO: 75811 - protein, 548 aa, Salmonella typhi
MNGAQWVVHALRAQGVKTVFGYPGGAIMPVYDALYDGGVEHLLCRHEQGAAMAAIGYARSTGKTGVCIATSGPGATNLITGLADALLDSVPVVAITGQVSAPFIGTDAFQEVDVLGLSLACTKHSFLVQSLAELPRIMAEAFEVANAGRPGPVLVDIPKDIQLASGELEPWFTTVDNEATFPQADVEQARQMLEQAKKPMLYVGGGVGMAKAVPALRKFIAVTQMPVTCTLKGLGAVEADYPYYLGMLGMHGTKAANFAVQECDLLIAVGARFDDRVTGKLNTFAPNASVIHMDIDPAEMNKLRQAHVALQGDLNSLLPALQQPLKIDAWRQSCAELRAEHAWRYDHPGETIYAPLLLKQLSERKPADSVVTTDVGQHQMWSAQHMTYTRPENFITSSGLGTMGFGLPAAVGAQVARPNDTVICISGDGSFMMNVQELGTVKRKQLPLKIVLLDNQRLGMVRQWQQLFFQERYSETTLTDNPDFLMLASAFGIPGQHITRKDQVEAALDTMLASEGPYLLHVSIDELENVWPLVPPGASNSEMLEKLS

SEQ ID NO: 75812 - protein, 857 aa, Salmonella typhi
MRLDRLTNKFQLALADAQSLALGHDNQFIEPLHLMSALLNQEGGSIRPLLTSAGINAGQLRTAIDQALSRLPQVEGTGGDVQPSSELVRVLNLCDKLAQKRGDNFISSELFVLAALESRGTLTDLLKSAGATTANITQAIEQMRGGESVNDQGAEDQRQALKKYTVDLTERAEQGKLDPVIGRDEEIRRTIQVLQRRTKNNPVLIGEPGVGKTAIVEGLAQRIINGEVPEGLKGRRVLALDMGALVAGAKYRGEFEERLKGVLNDLAKQEGNVILFIDELHTMVGAGKADGAMDAGNMLKPALARGELHCVGATTLDEYRQYIEKDAALERRFQKVFVAEPSVEDTIAILRGLKERYELHHHVQITDPAIVAAATLSHRYIADRQLPDKAIDLIDEAASSIRMQIDSKPEELDRLDRRIIQLKLEQQALMKESDEASKKRLDMLNEELDDKERQYSELEEEWKAEKASLSGTQTIKAELEQAKIAIEQARRVGDLARMSELQYGKIPELEKQLEAATQSEGKTMRLLRNKVTDAEIAEVLARWTGIPVSRMLEGEREKLLRMEQELHSRVIGQNEAVEAVSNAIRRSRAGLSDPNRPIGSFLFLGPTGVGKTELCKALANFMFDSDDAMVRIDMSEFMEKHSVSRLVGAPPGYVGYEEGGYLTEAVRRRPYSVILLDEVEKAHPDVFNILLQVLDDGRLTDGQGRTVDFRNTVVIMTSNLGSDLIQERFGELDYGRMKEMVLGVVSQNFRPEFINRIDEVVVFHPLGEQHIASIAQIQLQRLYKRLEERGYEIHISDEALKLLSANGYDPVYGARPLKRAIQQQIENPLAQQILSGELVPGKVIRLEANDDRIVAVQ

SEQ ID NO: 75813 - protein, 140 aa, Salmonella typhi
MKIRHEHIESVLLALAAEKGQAWVANAITEEYLRQGGGELPLVPGKDWNNQQNIYHRWLKGETKAQREKIQKLIPAVLAILPRELRHRLCIFDTLERRALLAAQEALSTAIDAHDDAVQAVYRKAHFSGGGSPGDSVVVH

SEQ ID NO: 75814 - protein, 115 aa, Salmonella typhi; identical to SEQ ID NO: 73054

SEQ ID NO: 75815 - protein, 255 aa, Salmonella typhi
MFIGIVSLFPEMFRAITDYGVTGRAVKKGLLNIQSWSPRDFAHDRHRTVDDRPYGGGPGMLMMVQPLRDAIHAAKAAAGEGAKVIYLSPQGRKLDQAGVSELATNQKLILVCGRYEGVDERVIQAEIDEEWSIGDYVLSGGELPAMTLIDSVARFIPGVLGHEASAIEDSFADGLLDCPHYTRPEVLEGMEVPPVLLSGNHAEIRRWRLKQSLGRTWLRRPELLENLALTEEQARLLAEFKTEHAQQQHKHDGMA

SEQ ID NO: 75816 - protein, 182 aa, Salmonella typhi; identical to SEQ ID NO: 73052

SEQ ID NO: 75817 - protein, 82 aa, Salmonella typhi
MVTIRLARHGAKKRPFYQVVVTDSRNARNGRFIERVGFFNPIASEKEEGTRLDLDRIAHWVGQGATISDRVAALIKEVKKAA

SEQ ID NO: 75818 - protein, 453 aa, Salmonella typhi
MFDNLTDRLSRTLRNISGRGRLTEDNVKETLREVRMALLEADVALPVVREFINRVKEKAVGHEVNKSLTPGQEFVKIVRSELVAAMGEENQTLNLAAQPPAVVLMAGLQGAGKTTSVGKLGKFLREKHKKKVLVVSADVYRPAAIKQLETLAEQVGVDFFPSDVGQKPVDIVNAALKEAKLKFYDVLLVDTAGRLHVDEAMMDEIKQVHASIKPVETLFVVDAMTGQDAANTAKAFNEALPLTGVVLTKVDGDARGGAALSIRHITGKPIKFLGVGEKTDALEPFHPDRIASRILGMGDVLSLIEDIESKVDRAQAEKLATKLKKGDGFDLNDFLEQLKQMKNMGGMASLMGKLPGMGQIPDNVKSQMDDKVLVRMEAIINSMTLKERAKPEIIKGSRKRRIAQGCGMQVQDVNRLLKQFDDMQRMMKKMKKGGMAKMMRSMKGMMPPGFPGR

SEQ ID NO: 75819 - protein, 263 aa, Salmonella typhi; identical to SEQ ID NO: 75129

SEQ ID NO: 75820 - protein, 292 aa, Salmonella typhi; identical to SEQ ID NO: 75131

SEQ ID NO: 75821 - protein, 232 aa, Salmonella typhi; identical to SEQ ID NO: 75074

SEQ ID NO: 75822 - protein, 491 aa, Salmonella typhi
MAVTQTAQACDLVIFGAKGDLARRKLLPSLYQLEKAGQIHPDTRIIGVGRADWDKEAYTHVVREALETFMKEKIDEGLWDTLSGRLDFCNLDVNDTPAFSRLGDMLDQKNRTTINYFAMPPSTFGAICKGLGEAKLNAKPARVVMEKPLGTSLATSREINDRVGEYFEECQVYRIDHYLGKETVLNLLALRFANSLFVNNWDNRTIDHVEITVAEEVGIEGRWGYFDQAGQMRDMIQNHLLQILCMIAMSPPSDLSADSIRDEKVKVLKSLRRIDRSNVREKTVRGQYTAGFAQGQKVPGYLEEEGANKSSNTETFVAIRVDIDNWRWAGVPFYLRTGKRLPTKCSEVVVYFKTPELNLFKESWQDLPQNKLTIRLQPDEGVDIQVLNKVPRLDHKHNLQITKLDLSYSETFNQTHLADAYERLLLETMRGIQALFVRRDEVEEAWKWVDSITEAWAMDNDAPKPYQAGTWGPVASVAMITRDGRSWNEFE

SEQ ID NO: 75823 - protein, 480 aa, Salmonella typhi
MSRRLRRTKIVTTLGPATDRDNNLEKVIAAGANVVRMNFSHGSPEDHKMRADKVREIAAKLGRHVAILGDLQGPKIRVSTFKEGKVFLNIGDKFLLDANLGKGEGDKEKVGIDYKGLPADVVPGDILLLDDGRVQLKVLEVQGMKVFTEVTVGGPLSNNKGINKLGGGLSAEALTEKDKADIQTAALIGVDYLAVSFPRCGEDLNYARRLARDAGCDAKIVAKVERAEAVCDQNAMDDIILASDVVMVARGNLGVEIGDPELVGIQKALIRRARQLNRAVITATQMMESMITNPMPTRAEVMDVANAVLDGTDAVMLSAETAAGQYPSETVAAMARVCLGAEKIPSINVSKHRLDVQFDNVEEAIAMSAMYAANHLKGVTAIITMTESGRTALMTSRISSGLPIFAMSRHERTLNLTALYRGVTPVHFDSAADGVVAAHEAVNLLRDKGYLVSGDLVIVTQGDVMSTVGSTNTTRILTVE

SEQ ID NO: 75824 - protein, 439 aa, Salmonella typhi
MQQIAGSVALAFNNLPRPHRVMLGSLTVLTLAVAVWRPYVYHPESAPIVKTIELEKSEIRSLLPEASEPIDQAAQEDEAIPQDELDDKTAGEVGVHEYVVSTGDTLSSILNQYGIDMSDISRLAASDKELRNLKIGQQLSWTLTADGDLQRLTWEVSRRETRTYDRTANGFKMSSEMQQGDWVNSLLKGTVGGSFVASAKEAGLTSSEISAVIKAMQWQMDFRKLKKGDEFSVLMSREMLDGKREQSQLLGVRMRSDGKDYYAIRAADGKFYDRNGVGLAKGFLRFPTAKQFRISSNFNPRRLNPVTGRVAPHRGVDFAMPQGTPVLSVGDGEVVVAKRSGAAGYYIAIRHGRTYTTRYMHLRKLLVKPGQKVKRGDRIALSGNTGRSTGPHLHYEVWINQQAVNPLTAKLPRTEGLTGSDRREYLAQVKEILPQLRFD

SEQ ID NO: 75825 - protein, 199 aa, Salmonella typhi; identical to SEQ ID NO: 73160

SEQ ID NO: 75826 - protein, 590 aa, Salmonella typhi
MRTEYCGQLRLSHVGQQVTLCGWVNRRRDLGSLIFIDMRDREGIVQVFFDPDRADALKLASELRNEFCIQVTGTVRARDAKNVNADMATGEIEVLASSLTIINRADSLPLDANHVNTEEARLKYRYLDLRRPEMAQRLKTRAKITSLVRRFMDDHGFLDIETPMLTKATPEGARDYLVPSRVHKGKFYALPQSPQLFKQLLMMSGFDRYYQIVKCFRDEDLRADRQPEFTQIDVETSFMTAPQVREVMEALVRHLWLEVKGVDLGDFPVMTFAEAERRYGSDKPDLRNPMELVDVADLLKSVEFAVFAGPANDPKGRVAALRVPGGAQLSRKQIDDYGNFVKIYGAKGLAYIKVNERAKGLDGINSPVAKFLTADIVEAILERTGAQDGDMIFFGADNKKVVADALGALRLKLGKDLSLTDEDKWAPLWVIDFPMFEDDGEGGLTAMHHPFTAPRDMTASELKTAPEEAVANAYDMVINGYEVGGGSVRIHNGEMQQTVFGILGINEQEQREKFGFLLDALKYGTPPHVGLAFGLDRLTMLLTGTDNIRDVIAFPKTTAAACLMTEAPSFANQAALTELGIQVVKKAENN

SEQ ID NO: 75827 - protein, 188 aa, Salmonella typhi; identical to SEQ ID NO: 75127

SEQ ID NO: 75828 - protein, 359 aa, Salmonella typhi; identical to SEQ ID NO: 75170

SEQ ID NO: 75829 - protein, 941 aa, Salmonella typhi
MDKIEVRGARTHNLKNINLVIPRDKLIVVTGLSGSGKSSLAFDTLYAEGQRRYVESLSAYARQFLSLMEKPDVDHIEGLSPAISIEQKSTSHNPRSTVGTITEIHDYLRLLFARVGEPRCPDHDVPLAAQTVSQMVDNVLSQPEGKRLMLLAPIIKERKGEHTKTLENLASQGYIRARIDGEVCDLSDPPKLELQKKHTIEVVIDRFKVRNDLSQRLAESFETALELSGGTAVVADMDDEKAEELLFSANFACPICGYSMRELEPRLFSFNNPAGACPTCDGLGVQQYFDPDRVIQNPDLSLAGGAIRGWDRRNFYYFQMLKSLAEHYKFDVDAPWASLSANVHKVVLYGSGKENIEFKYMNDRGDTSVRRHPFEGVLHNMERRYKETESSAVREELAKFISNRPCASCEGTRLNREARHVFVENTPLPAISDMSIGHAMDFFTNLKLSGQRAKIAEKVLKEIGDRLKFLVNVGLNYLTLSRSAETLSGGEAQRIRLASQIGAGLVGVMYVLDEPSIGLHQRDNERLLGTLIHLRNLGNTVIVVEHDEDAIRAADHVIDIGPGAGVHGGEVVAEGPLEAIMAVPESLTGQYMSGKRKIEVPKQRVPANPEKVLKLTGARGNNLKDVTLTLPVGLFTCITGVSGSGKSTLINDTLFPIAQRQLNGATIAEPAPYRDIQGLEHFDKVIDIDQSPIGRTPRSNPATYTGVFTPVRELFAGVPESRSRGYTPGRFSFNVRGGRCEACQGDGVIKVEMHFLPDIYVPCDQCKGKRYNRETLEIKYKGKTIHEVLDMTIEEAREFFDAVPALARKLQTLMDVGLTYIRLGQSATTLSGGEAQRVKLARELSKRGTGQTLYILDEPTTGLHFADIQQLLDVLHQLRDQGNTIVVIEHNLDVIKTADWIVDLGPEGGSGGGEILVAGTPETVAECEASHTARFLKPMLK

SEQ ID NO: 75830 - protein, 176 aa, Salmonella typhi; identical to SEQ ID NO: 75174

SEQ ID NO: 75831 - protein, 352 aa, Salmonella typhi
MLELNFSQTLGTHCLTLNETLPASGITAIFGVSGAGKTSLINAISGLTRPRKGRIVLNGRVLHDAENGICLTPEKRRIGYVFQDARLFPHYKVRGNLRYGMAKSMTGQFDKLVSLLGIEALLDRLPGSLSGGEKQRVAIGRALLTAPELLLLDEPLASLDIPRKRELLPYLQRLAREINIPMLYVSHSLDEILHLADKVMVLEDGQVKAFGPLEEVWGSSVMHPWLPKEQQSSILKVSVLEHHPHYAMTALALGDQHLWVNKLNQPLQSTLRIRIQASDVSLVLQPPQQTSIRNVLRAKVANCYDDNGQVEVQLEIGGRTLWARISPWARDELNIKPGLWLYAQVKSVSITA

SEQ ID NO: 75832 - protein, 427 aa, Salmonella typhi
MNTLSVSRLALALAFGVTLSACSSTPPDQIPSDQTAPGTASRPILSANEAKNFVAARYFASLTPNTAPWSPSPITLPAQPDFVVGPAGTPGVTHTSIQAAIDAAMVKRTNKRQYIAIMPGDYQGTVYVPAAPGSLTLYGTGEKPIDVKIGMAIDGEMSVADWRRAVNPGGKYMPGKPAWYMFDNCQSKHAATIGVMCSAAFWSQNNGLQLQNLTIENTLGDSVDAGNHPAVALRTDGDKVQINKVNILGRQNTFFVTNSGVQNRLQTDRQPRTLVTNSYIEGDVDMVSGRGAVVFDNTNFQVVNSRTQQEAYVFAPATLSNIYYGFLAINSRFNASGDGVAQLGRSLDVDANTNGQVVIRDSVINEGFNVAKPWADAVISKRPFAGNTGTVDDKDEVQRNLNDTNYNRMWEYNNRGVGSKVVTEPKQ

SEQ ID NO: 75833 - protein, 561 aa, Salmonella typhi
MPESKYRQQTIRAPRGTVLTAKSWLTEAPLRMLMNNLDPDVAENPHELVVYGGIGRAARNWECYDAIVDALTRLEADETLLIQSGKPVGVFKTHDNAPRVLIANSNLVPHWATWEHFNELDAKGLAMYGQMTAGSWIYIGSQGIVQGTYETFVEAGRQHYNGTLAGRWALTAGLGGMGGAQPLAATLAGACSLTIECQQSRIDFRLRTRYVDEQAATLDDALARITRYTREGKAVSVALCANAADILPELVNRGVRPDLVTDQTSAHDPLHGYLPSGWCWEEYQKNAQSDPRGTMQAAKRSMAAHVRAMLAFSKMGVPTFDYGNNIRQMAKEMGVENAFDFPGFVPAYIRPLFCRGIGPFRWVALSGDPQDIYKTDAKVKEIVAEDKHLHHWLDMARERIHFQGLPARICWVGLEWRQKLGLAFNEMVRCGEVSAPIVIGRDHLDSGSVASPNRETEAMRDGSDAVSDWPLLNALLNTASGATWVSLHHGGGVGMGFSQHAGMVIVCDGTDEAAARIRRVLHNDPATGVMRHADAGYDLAVECAVEQGLNLPMVAATQGKG

SEQ ID NO: 75834 - protein, 506 aa, Salmonella typhi
MNTMTLTPGQLSLSQLYDVWRHPVQLRLDASAIDGINASVACVNDIVAEGRTAYGINTGFGLLAQTRIADEDLQNLQRSLVLSHAAGVGDPLDDAMVRLIMVLKINSLARGFSGIRLSVIEALIALVNAGVYPLIPAKGSVGASGDLAPLAHLSLTLLGEGKARWQGEWLPAQAALKKAGLEPVALAAKEGLALLNGTQASTAFALRGLFEAQELFASAVVCGALTTEAVLGSCRPFDARIHAARGQQGQIDVARLFRHLLTDTSAIAESHHHCHKVQDPYSLRCQPQVMGACLTQLRQTKEVLLAEANAVSDNPLVFAEAGEVISGGNFHAEPVAMAADNLALAIAEIGALSERRITLMMDKHMSQLPPFLVKNGGVNSGFMIAQVTAAALASENKALAHPHSVDSLPTSANQEDHVSMAPAAGRRLWEMAANTRGVIAVEWLAACQGIDLREGLTSSPLLEQARQTLRERVAHYTQDRFFAPDIECATTLLAQGALQRLVPDFM

SEQ ID NO: 75835 - protein, 429 aa, Salmonella typhi
MTTDDLAFDKRHIWHPYTSMTSPLPVYPVERAEGCELVLASGERLIEGMSSWWAAIHGYNHPQLNAAMKAQIDAMSHVMFGGITHQPAVNLCRKLVAITPEPLECVFLADSGSVSVEVAMKMALQYWQARGESRQRFLTFRHGYHGDTFGAMSVCDPDNSMHSLWKGYLPENLFAPAPQSRMDGEWDESDIAPFARLMAAHRHEIAAVILEPIVQGAGGMRIYHPQWLRRIRNMCDREGILLIADEIATGFGRTGKLFACEHAGIAPDILCLGKALTGGTMTLSATLTTRQVAETISNGEAGCFMHGPTFMGNPLACAVACASLTLLESGEWRQQVASIESQLRAELAPAQSSPWVADVRVLGAIGVVETTHPVNMAALQRFFVGQGVWIRPFGKLIYLMPPYIIRPDQLRRLTQAVNDAVHNETFFSH

SEQ ID NO: 75836 - protein, 346 aa, Salmonella typhi
MARHPRWTLSQVTELFEKPLLELLFEAQQIHRQHFDPQQVQVSTLLSIKTGACPEDCKYCPQSSRYKTGLEAERLMEVEQVLDSARKAKNAGSTRFCMGAAWKNPHERDMPYLEKIVQGVKAMGLETCMTLGMLNESQAQRLANAGLDYYNHNLDTSPEFYGNIITTRTYQERLDTLEKVREAGIKVCSGGIVGLGETVTDRAGLLLQLANLPTPPESVPINMLVKVKGTPLADNDDVDAFDFIRTIAVARIMMPTSYVRLSAGREQMNEQTQAMCFMAGANSIFYGCKLLTTPNPAEDKDLQLFRKLGLNPQQTRVLAGDNEQQQRLEQTLMTPDTDDYYNAAAL

SEQ ID NO: 75837 - protein, 302 aa, Salmonella typhi
MRNRTLADLDRVVALGGGHGLGRVLSSLSSLGSRLTGIVTTTDNGGSTGRIRRSEGGIAWGDMRNCLNQLITEPSVASAMFEYRFGGNGELSGHNLGNLMLKALDHLSVRPLEAINLIRNLLKVDAQLIPMSELPVDLMAIDDQGHEIYGEVNIDQLATPPQEIMLTPNVPATREAVQAINDADLILIGPGSFYTSLMPCLLLDELAQALRRTPAPMVYIGNLGRELSLPAASLTLVDKLAMMEQYIGKKVIDTVVVGPRVDVSAVNDRLVIQEVLEASDIPYRHDRQLLHNALEKALQALG

SEQ ID NO: 75838 - protein, 563 aa, Salmonella typhi
MMPFSIIKNIANRERMEIFFTILIMTLVVSLSGVFTRVLPFQLPLPLMQIAIGALLAWPTFGLHVEFDPELFLVLFIPPLLFADGWKTPTREFLEHGREIFGLALALVLVTVVGIGFLIYWLVPGIPLIPAFALAAVLSPTDAVALSGIVGEGRIPKKIMGILQGEALMNDASGLVSLKFAVAVAMGTMVFTVGGATLEFFKVAIGGILAGFVVSWLYGRSLRFLSRWGGDEPATQIVLLFLLPFASYLIAEHIGVSGILAAVAAGMTITRSGVMRRAPLAMRLRANSTWAMLEFVFNGMVFLLLGLQLPGILESSLAAAEADPNVETWMLFTDIVLIYAALMLVRFGWLWTMKKFSLRFLKKKPMEFASWTSREILIASFAGVRGAITLAGVLSIPLLLPDGSGFPARYELVFLAAGVILFSLFVGVIMLPLLLQHLEVADHAQQLKEERIARAATAEVAIVAIQKMEERLAADTEENIDNQLLTEVSSRVIGNLRRRADGRNDVESSIQEENLERRFRLAALRSERAELYHLRATREISNETLQKLLHDLDLMEALLIENQ

SEQ ID NO: 75839 - protein, 652 aa, Salmonella typhi
MSQTHKHAIPANIADRCLINPEQYETKYKQSINDPDTFWGEQGKILDWITPYQKVKNTSFAPGNVSIKWYEDGTLNLAANCLDRHLQENGDRTAIIWEGDDASQSKHISYRELHRDVCRFANTLLDLGIKKGDVVAIYMPMVPEAAVAMLACARIGAVHSVIFGGFSPEAIAGRIIDSSSRLVITADEGVRAGRSIPLKKNVDDALKNPNVTSVEHVIVLKRTGNDIDWQEGRDLWWRDLIEKASPEHQPEAMNAEDPLFILYTSGSTGKPKGVLHTTGGYLVYAATTFKYVFDYHPGDIYWCTADVGWVTGHSYLLYGPLACGATTLMFEGVPNWPTPARMCQVVDKHQVNILYTAPTAIRALMAEGDKAIEGTDRSSLRILGSVGEPINPEAWEWYWKKIGKEKCPVVDTWWQTETGGFMITPLPGAIELKAGSATRPFFGVQPALVDNEGHPQEGATEGNLVITDSWPGQARTLFGDHERFEQTYFSTFKNMYFSGDGARRDEDGYYWITGRVDDVLNVSGHRLGTAEIESALVAHPKIAEAAVVGIPHAIKGQAIYAYVTLNHGEEPSPELYAEVRNWVRKEIGPLATPDVLHWTDSLPKTRSGKIMRRILRKIAAGDTSNLGDTSTLADPGVVEKLLEEKQAIAMPS

SEQ ID NO: 75840 - protein, 329 aa, Salmonella typhi; identical to SEQ ID NO: 43717

SEQ ID NO: 75841 - protein, 170 aa, Salmonella typhi; identical to SEQ ID NO: 43718

SEQ ID NO: 75842 - protein, 229 aa, Salmonella typhi
MKPLIALMLFMTFFAHAADPEPGSQYLQAAEAGDRRAQYFLADSWLSYGDLNKAEYWAQKAADNGDADACALLAQIKITNPVSLDYPDAKKLAEKAANAGSKAGEITLARILVNTQAGRPDYPKAISLLQKASEDLDNDSAVDAQMLLGLIYANGVGIAADDEKAAWYFKRSSAISRTGYSEYWAGMMFLNGEPGFIEKNKQKALHWLNLSCLEGFDTGCEEFETLTNG

SEQ ID NO: 75843 - protein, 715 aa, Salmonella typhi
  MISC_FEATURE (140)..(140): X=any amino acid
MKKVVTVCPYCASGCKINLVVDNGKIVRAEAAQGKTNQGTLCLKGYYGWDFINDTQILTPRLKTPMIRRQRGGKLESVSWDEALNYVAERLSAIKAKYGPDAIQTTGSSRGTGNETNYVMQKFARAVIGTNNVDCCARVXHGPSVAGLHQSVGNGAMSNAINEIDNTDLVFVFGYNPADSHPIVANHVINAKRNGAKIIVCDPRKIETARIADMHIALKNGSNIALLNAMGHVIIEENLYDKAFVASRTEGFEEYSKIVEGYTPESVEEITGVSAQEIRQAARMYASAKSAAILWGMGVTQFYQGVETVRSLTSLAMLTGNLGKPSAGVNPVRGQNNVQGACDMGALPDTYPGYQYVKFPENREKFAKAWGVESLPAHTGYRISELPHRAAHGEVRAAYIMGEDPLQTDAELSAVRKAFEDLELVIVQGIFMTKTASAADVILPSTSWGEHEGVFSAADRGFQRFFKAVEPKWDLKTDWQIISEIATRMGYPMHYNNTQEIWDELRHLCPDFYGATYEKMGELGYIQWPCRDTSDADQGTSYLFKEKFDTPNGLAQFFTCDWVAPIDKLTEEYPMVLSTVREVGHYSCRSMTGNCAALAALADEPGYAQINTADAARLGIEDEALVWVHSRKGKIITRAQVSDRPNKGAIYMTYQWWIGACNELVTENLSPITKTPEYKYCAVRVEPIADQRAAEQYVIDEYNKLKTRLRESAMG

SEQ ID NO: 75844 - protein, 302 aa, Salmonella typhi
MFAAIIIGIFIISVIYAHSRGVEKQKLSRQLFDHSTFMAPINMFMTRFSTLPAKQPYFDTTAFPELQKLTENWQVIREEALRLQHHIKAAQANNDAGFNTFFKRGWKRFYLKWYSDAHPSAETLCPITTKLVNSIPSIKAAMFAELPPGAYLGKHRDPYAGSVRYHLGLSTPNDDRCFIEVDRQRHSWRDGEAVIFDETYVHWAENKTEQTRIILFCDIERPMKWRWAQSVNHWVGASLMSAASSPNDENDRTGAINRIFKYVHAARDAGQRLKKKNRTLYYALKYLVIAAIFAAIILFSLL

SEQ ID NO: 75845 - protein, 368 aa, Salmonella typhi
MFHRLWTLIRKELQSLLREPQTRAILILPVLIQVILFPFAATLEVTNATIAIYNEDNGKHSVELTQRFARAKAFTHVLLLNSPQEIQPTIDTQKALLLVRFPADFSRNLDTFQPAPMQLILDGRNSNSAQIAANYLQQIVKEYQQTLMDGKPKPNNSELVVRNWYNPNLDYKWFVVPSLIAMITTIGVMIVTSLSVAREREQGTLDQLLVSPLTTWQIFVGKAVPALIVATFQATIVLAIGIWAYQIPFAGSLALFYFTMVIYGLSLVGFGLLISALCATQQQAFIGVFVFMMPAILLSGYVSPVENMPVWLQNLTWINPIRHFTDITKQIYLKDASLGIVWGSLWPLLVIAATTGSAAYAMFRRKVM

SEQ ID NO: 75846 - protein, 253 aa, Salmonella typhi
MRICSNEPCIVLLTEKDTWLRVNGKEPISLKANHMAILACENNVIDISSLNSVLVIQVSRNNIKDYLQFLNKDLSHLPVWQRNADPLLTATCLTPDIFRVAARYSAMETPDEIVSERTRALLFTVLSRFLDHKKFISLLMHMLRSRISDSVYHIIQSDIHKDWNLSAVASCLCLSPSLLKKKLKNENTSYSQIITTCRMRYAVNQLLMDGKNISQVSQLCGYNSTSYFISVFKEFYGMTPLHYVSQHRERSAA

SEQ ID NO: 75847 - protein, 740 aa, Salmonella typhi
MRWTLFILFCLLGAPAHAVAIPGVTTGTSTSQQAAPEPSPEQKKAAYAALADVLENEASRNELIAQLREASTTPPTEPAPALAPPAAKDEKTVLENVTTVTRQYGDAFATRFAQLYRNITDAPYKPFNSQTFTNALTHFLFLAVAVFGFYSVIRLCALPLYRKMGLWARKKNRERSNWLQLPAMIAGAFIIDLLLLALTLFIGQMLSDNFHAGSRTIAFQQSLFLNAFALIEFFKAILRLIFCPNVPELRPFAIQDATARYWNRRMSSLSSLIGYGLIVAVPIISNQVNVQVGAMANVAIMLCITIWALYLIFKNKAEITQHLLSLAERSLAFFSLFIRAFALVWHWLASAYFIVLFFFSLFDPGNSLKFMMGATVRSLAIIGIAAFISGMFTRWIAKTITLSPHTQRNYPELQKRLNGWLSSALKVARFLTVCVAVMLLLNAWGLFDFWHWLHYGAGEKMVDILIRIALILFFSAVGWTILASLIENRLASDIHSRPLPSARTRTLLTLFRNALAVIISTITIMIVLSEIGVNIAPLLAGAGALGLAISFGSQTLVKDIITGVFIQFENGMNTGDLVTIGPLMGTVERMSIRSVGVRQDTGAYHIIPWSSITTFANFVRGIGSVVANYDVDRHEDADKANQALKDAVTALMETEDIRGLIIGEPTFAGIVGLTNTAFTLRVSFTTLPLKQWTVRFALDSQVKKHFDLANVRAPVQTYQVLPAPAGGPPPDSLPPREPTI

SEQ ID NO: 75848 - protein, 240 aa, Salmonella typhi
MIEFKNVSKHFGPTQVLHNIDLNIRQGEVVVIIGPSGSGKSTLLRCINKLEEITSGDLIVDGLKVNDPKVDERLIRQEAGMVFQQFYLFPHLTALENVMFGPLRVRGVKKEEAEKQAKALLAKVGLAERAHHYPSELSGGQQQRVAIARALAVKPKMMLFDEPTSALDPELRHEVLKVMQDLAEEGMTMVIVTHEIGFAEKVASRLIFIDKGRIAEDGSPQALIENPPSPRLQEFLQHVS

SEQ ID NO: 75849 - protein, 219 aa, Salmonella typhi
MQFDWSAIWPAIPLLLEGAKMTLWISVLGLAGGLVIGLAAGFARTFGGWFANHIALVFIEIIRGTPIVVQVMFIYFALPMAFNDLRIDPFSAAVVTIMINSGAYIAEITRGAVLSIHKGFREAGLALGLSRRETIRHVILPLALRRMLPPLGNQWIISIKDTSLFIVIGVAELTRQGQEIIAGNFRALEIWSAVAVFYLIITLVLSFILRRLERRMKIL

SEQ ID NO: 75850 - protein, 167 aa, Salmonella typhi; identical to SEQ ID NO: 73070

SEQ ID NO: 75851 - protein, 295 aa, Salmonella typhi
MPGSTRKLPVWLPILVLLIAMSSIQSGASLAKSLFPLVGAPGVTALRLALGTLILIAFFKPWRLRFAKEQRLPLLFYGLSLGGMNYLFYLSIQTVPLGIAVALEFTGPLAVALFSSRRPVDFIWVVLAVLGLWFLLPLGQDMSHVDLTGAALALGAGACWAVYILTGQRAGAEHGPATVAVGSLITAIIFVPIGAVQAGDALWHWSILPLGLAVAVLSTALPYSLEMIALTRLPTRTFGTLMSMEPVLAAISGMIFLGETLTGIQILALCAIIAASMGSTLTIRREPQIKQVDVK

SEQ ID NO: 75852 - protein, 548 aa, Salmonella typhi
MSKKEFIYQAPFPMGEDKTEYYLLTSDYVSVSEFNGESILNVEPQALTLLAQQAFHDASFMLRPEHQQQVAAILHDPEASENDKYVALQFLRNSEIAAKGILPTCQDTGTAIIMGKKGQRVWTGGGDEAALSKGVFNTYIEDNLRYSQNAPLDMYKEVNTGSNLPAQIDLYAVDGDEYKFLCVAKGGGSANKTYLYQETKALLTPGKLKNFLVEKMRTLGTAACPPYHIAFVIGGTSAESTLKTVKLASTHYYDALPTEGNEHGQAFRDLHLEQELLEEAQKLGLGAQFGGKYFAHDIRVIRLPRHGASCPVGMGVSCSADRNIKAKINREGIWIEKLEHNPGQYIPPALRQAGEGDAVKVDLNRPMKEILAQLSQYPVSTRLSLTGTIIVGRDIAHAKLKERIESGEDLPQYIKDHPIYYAGPAKTPAGYPSGSLGPTTAGRMDSYVDLLQSHGGSMIMLAKGNRSQQVTDACKKHGGFYLGSIGGPAAVLAQQSIKHLECVEYPELGMEAIWKIEVEDFPAFILVDDKGNDFFQQIVSKQCANCAK

SEQ ID NO: 75853 - protein, 543 aa, Salmonella typhi
MKHSLPCRALRKRPMKLGTTVILMVSAVLFSVLVVVHLIYFSQISSMTRDALADKALAVARSLADSPAIREGLKKPPAESGIQPLSEAVSQHNGFLFIVVTNMQGIRYSHPETQRIGQPFKGDDILLALQGKENVAINRGFLAKALRVFTPVYDEHHRQIGVVAIGLELSHVTQQINNSRGSIIWSILFGALVGLLGTYALVKVLKRILFGLEPYEISTLFEQRQAMLQSIKEGVIAVDGSGEVTLINHAAQALLDYRKTQDDARLSTLSHAWPQVVDISEVLRDGTPRRDEEIIVKGRLLLVNTVPVRSNGEIIGAISTFRDKTEVRQLMQRLDGMVNYADALRERSHEFMNKLHVILGLLHLKSYKQLEAYIIKTANNYQEEIGLLLGKIKSPIIAGFLLSKITRASDFGHSLVISSDSQLPDNNNEDQVTVLITALGNLIENALEALSQESGGEISVSLHYRHGWLHCEVSDDGPGIEPERIEAIFEKGVSSKGAERGVGLALVKQQVEALGGVISVESEPGIFTQFFVQLPWDGKRTSL

SEQ ID NO: 75854 - protein, 526 aa, Salmonella typhi
MNSTLIDSLLARRRAVSPWAGLYFLQSLLINLALGYPFSLLYTAAFTCLLLLLWRYLPRGQKALLGICSLVAACYFPFGQAYGAPNFNTLLALHSTNMEESSEILTIFPWYSYLTGLFIFALGIIALRRRKEEVRPRWNSLDSLCLLISVAAFFVAPVQNLAWGGVFKVIDTGYPVFRFAKDVIVNNNEVIEEQHRMAQLSGIKDSWTVTAVKPRYHIYVVVIGESARRDAMGAFGGHWDNTPFASHVNGDFFMDYIAASGSTQKSLGLTLNRVVDNKPQYQDNFVTLANRAGFQTWWFSNQGQIGEYDTAIASIAKRADEAHFLKNGDFEADKNTRDDALLTMTAQVLATERTQPQLIVLHLMGSHPQACDRTHGKYATFVQSKETSCYLYTMTQTDDLLRQLYTQLRHSGDSFSLVYFSDHRLAFKERGKAVQYLAHDDKFQQNFQVPFMVLSSDSKAHRIIKARRSANDFLSFFSQWTGISAKEIKNRYRFISEQKAGPVYITNFKLQKVDYNHLGSDIFSLK

SEQ ID NO: 75855 - protein, 531 aa, Salmonella typhi
MLVSSNVTMQFGSKPLFENISVKFGGGNRYGLIGANGSGKSTFMKILGGDLEPTLGNVSLDPNERIGKLRQDQFAFETFTVLDTVIMGHGELWEVKQERDRIYALPEMSEEDGYKVADLEVKYGEMDGYSAEARAGELLLGVGIPLEQHYGLMSEVAPGWKLRVLLAQALFSNPDILLLDEPTNNLDIDTIRWLEQVLNERDSTMIIISHDRHFLNMVCTHMADLDYGDLRVYPGNYDEYMTAATQARERLLADNAKKKAQIAELQSFVSRFSANASKSRQATSRARQIDKIKLEEVKASSRQNPFIRFEQDKKLFRNALEVEALTKGFDNGPLFKNVNLLLEVGEKLAVLGTNGVGKSTLLKTLVGDLDADHGTVKWSENARIGYYAQDHEYEFENDLTVFEWMSQWKQEGDDEQAVRSILGRLLFSQDDIKKPAKVLSGGEKGRMLFGKLMMQKPNILIMDEPTNHLDMESIESLNMALELYQGTLIFVSHDREFVSSLATRVIEITPERVVDFSGNYDDYLRSKGIES

SEQ ID NO: 75856 - protein, 269 aa, Salmonella typhi; identical to SEQ ID NO: 72756

SEQ ID NO: 75857 - protein, 810 aa, Salmonella typhi
MTQLKLDTLSDRIKAHKTALVHIVKPPVCTERAQHYTEMYQQHLDKPIPVRRALALAHHLAERTIWIKHDELIVGNQASEVRAAPIFPEYTVSWIEKEIDDLADRPGAGFSVSEENKRILHDVCPWWRGQTVQDRCYGMFTDEQKGLLATGIIKAEGNMTSGDAHLAVNFPLLLEKGLDDLRDKVAERRSRINLTVLEDLHGEQFLKAIDIVLDAVSQHITRFAALARQMAGEESRESRRKELLTIAENCEVIAHQPPQTFWQALQLCYFIQLILQIESNGHSVSFGRMDQYLYPYYRRDVELNQTLDREHAIELLHSCWLKLLEVNKIRSGSHSKASAGSPLYQNVTIGGQNLINGQPMDAVNPLSYAILESCGRLRSTQPNLSVRYHAGMSNDFLDACVQVIRCGFGMPAFNNDEIVIPEFIKLGIEPQDAYDYAAIGCIETAVGGKWGYRCTGMSFINFARVMLAALEGGRDATSGKVFLPQEKALSAGNFNNFDEVMAAWDTQIRYYTRKSIEIEYVVDTMLEENVHDILCSALVDDCIERAKSIKQGGAKYDWVSGLQVGIANLGNSLAAVKKLVFEQGVIGQQQLAAALADDFDGLPHEQLRQRLINGAPKYGNDDDSVDTLLARAYQTYIDELKQYHNPRYGRGPVGGNYYAGTSSISANVPFGAATMATPDGRKAHTPLAEGASPASGTDHLGPTAVIGSVGKLPTGSILGGVLLNQKLNPTTLENESDKQKLMVLLRTFFEVHKGWHIQYNIVSRETLLDAKKHPDQYRDLVVRVAGYSAFFTALSPDAQDDIIARTEHML

SEQ ID NO: 75858 - protein, 301 aa, Salmonella typhi
MRYDISRDAICYGFFMRLLKRVIVVVLLGVILFMVRDDIRYVYQLILKYGDKPSALALSSYKAVIQQKPVAGVKSNLSGLTYSAEDRMLFAVINNPPELVWLTTEGQLVGRMPLQGIHDPESIAWSGGNQFQIGSEKDGAVYKTQVDIQRGAMQIISMVKLEGYDKAKNKGLEGTAWDAKNERLYAAKERKPIMIKEVEMSKNGITRALPSAITASVSDVSGLEYHAPTDSLLVLSDESKMILEVSSEWRVRDRLFLTAEWSGLRDDIPQPEGIAMDNENNLYIVSEPNLFYKFSCDIQND

SEQ ID NO: 75859 - protein, 291 aa, Salmonella typhi
MLKVFNPSPVQVGSIECLQSAQNWQRKSLSLQGLNLLQSVLIKLTTGKISITTSSGEYITASGPMLIFLAKDQTIHITMEETHEQLNYNLIELDSASIKNAYNFFLYEHADFSAPLTKPTTKHLLAPIETGVARVFNLLHSSNKSQKLSQDKKEYLIRFLLSEFIYEPEAFALFRELSQNTLAENIYNIIISDISRKWALKDISDSLYMSCSTLKRKLKQEHTSFSEVYLNARMNKATKLLRNSEYNITRVAYMCGYDSASYFTCVFKKHFKTTPSEFLAFLSSSRHQYVN

SEQ ID NO: 75860 - protein, 454 aa, Salmonella typhi
MSHKSVSAVSMLFNVGAETGVLGGLMLDNDRWDEIAPLLNSGDFYYGQHQIIFREIERLVSAGLPIDLITLSESMERKDLLERCGGVAYLAELSKNTPSAANIVAYAEIVREYSRKRRLVKLGHELHQLASVGDADIPGLIEKAEKQLFSLAQQACDPDICLSVTTQVADTVSWLESVSGGSGVTGTATGFAELDEKTCGWQDGDLILLGARPSMGKTAEALKHAVAALEGSPGKTVQFYSIEMPTQQLIMRLLSMLARVPFDNLRKGLLSEGQWSLLADAVAKLTSWEGRLLIDDTSYQTPSTLRISARRNVRKYGQPSLILVDYLQLMSCPGRENRTQEIQEISRSLKSLAKEIRCPVAALSQLNRSVEQRQDKRPMVSDLRDSGSLEQDADVIMFLYRDEVYNEHSPDRGIAEIILGKQRQGPLGTVKVRFEGEYMRFSEYHLGYGEVSYG

SEQ ID NO: 75861 - protein, 413 aa, Salmonella typhi
MFMEFSAGLMPLETALTQMLSRITPLTAVETLPLMNCFGRILATDIVSPLDVPGFDNSAMDGYAVRVADLSADKPLPVAGKAFAGQPYQGEWPAGTCIRIMTGAPVPAGCEAVVMQEQTEQTDDGVRFTTDVRCGQNIRRRGEDIRQDAVVFPAGTRLTTAELPVLASLGIADAQVVRKVRVALFSTGDELQLPGQLLEAGQIYDTNRLTIHLMLQQLGCEVINLGIIPDDPGKLRAAFVDADSQADVVISSGGVSVGEADYTKTILEELGEIAFWKLAIKPGKPFAFGKLSNSWFCGLPGNPVSAALTFYQLVQPLLAKLGGNTASAVPPRQRVRTTSRLKKTPGRLDFQRGILQRSANGELEVTTTGHQGSHIFSSFNLGNCFIVLERERGNVEPGEWVEVEPFNALFGGL

SEQ ID NO: 75862 - protein, 623 aa, Salmonella typhi
MPHSDELDSRDVLSVSGLNIAFHHEGQQVDAVRNVSLRLKRGETLTIVGESGSGKSVTALALMRLIEQSGANVRCGEMLLRRRNRQVIELSEQSDAQMRRVRGADIAMIFQEPMTSLNPVFTVGEQIAESIRLHQGASHEEALAEAKRMLDQVRIPESQAILSRYPHQLSGGMRQRVMIAMALSCRPAVLIADEPTTALDVTIQAQILQLIKVLQQEMSMGVIFITHDMGVVADIADRVLVMYQGEAVETGSVEQIFHAPTHPYTQTLLAAVPQLGAMRGHSLPRRFPLISADEPALYESQIEQDTVVEGEPILQVRGLVTRFPLRSGLFNRVTREVHAVENISFDLWPGETLSLVGESGSGKSTTGRALLRLVESRQGEIIFNGQRIDTLSAGKLQPLRRDIQCIFQDPYASLDPRQTVGYSIMEPLRIHGLGQGDAAAKRVAWLLERVGLRPEHAWRYPHEFSGGQRQRICIARALALNPKVIIADEAVSALDVSVRGQIINLLLDLQREMGIAYLFISHDMAVVERISHRVAVMYLGQIVEMGPRRAVFENPQHPYTRKLMAAVPVADPSRHRPRRVLLSDDIPSNIHKRGEETPAVSLQLVGPGHYVARPLQDNALSRL

SEQ ID NO: 75863 - protein, 303 aa, Salmonella typhi; identical to SEQ ID NO: 75106

SEQ ID NO: 75864 - protein, 441 aa, Salmonella typhi
MSNVTHQPKIGFVSLGCPKNLVDSERILTELRTEGYDVVPHYDDADMVIVNTCGFIDSAVQESLEAIGEALNENGKVIVTGCLGAKEDQIREVHPKVLEITGPHSYEQVLQHVHHYVPKPKHNPFLSLVPEQGVKLTPRHYAYLKISEGCNHRCTFCIIPSMRGDLVSRPIGDVLSEAKRLVDAGVKEILVISQDTSAYGVDVKHRTGFHNGEPMKTSMVSLCEQLSKLGVWTRLHYVYPYPHVDDVIPLMAEGKILPYLDIPLQHASPRILKLMKRPGSVDRQLARIKQWREICPELTLRSTFIVGFPGETEEDFQMLLDFLKEARLDRVGCFKYSPVEGAGANELPDQVPEEVKEERWNRFMQLQQQISAERLQEKVGREILVIVDEVDEEGAIGRSMADAPEIDGAVYLNGETNVKPGDIVRVKVENADEYDLWGSRV

SEQ ID NO: 75865 - protein, 664 aa, Salmonella typhi
MRLVLCEKPSQGRDIAKFLGATQRGEGFLNGPGVTVTWARGHLLETAEPEVYGEQYGKPWRTDVLPLLPQQWKLVVKADAKAQFAVINRLLKQVDEVVIATDADREGEVIARELLDYCKFQGRVFRLWMSALDDASIRSALADLWPSSRTESLYYAGVGRSRADWLIGMNLTRLFTLLGREAGIGNVLSVGRVQTPTLAIVVKRDREIDNFVSKPYFEVIATMAVNGVLFPSKWVPAAQYCDEEKRCIQSGVAAQVVQLCRQTPTAAIINCQIERKKQSAPLAFSLSTLQQACSRHWGMPAQTVLDIAQKLYETHKLTTYPRTDCGYLPLSMREEIPQVLSAVVGTDPALQPVVASLDTQFVSRIWNDKKITAHHGIIPTKHTGDLSKLSDAERNVYQLVRLHYLAQFLPQMEIDVTEATFNIGGQLFRTRGNVLVKPGWKSLFGKMSEDDEDNTGETTLPAMQAGQVCQVQGAEQKVLQTKPPAPYNDGTLIAAMTNAAAFVTDAALKKVLKENAGIGTEATRAGIIDTLLKRGFLVREKKTLKSTPLGRNLVDVLPGTLTNPGLTALWEQMLDEVAAGRVSLDDFMAKQSQWVSQLVAQGRSQPLTMQAPPSPPCPVCGGKTLQRNGKSGLFWGCLKYPECKGIVNNGNKGPRGRRRKPSPA

SEQ ID NO: 75866 - protein, 178 aa, Salmonella typhi
MASKGVNKVILVGNLGQDPEVRYMPNGGAVVNLSLATSDTWTDKQTGDKKERTEWHRVVLYGKLAEIASEYLRKGSQVYIEGALRTRKWTDQSGVEKYTTEVVVSQSGTMQMLGGRNSAGSGQQQGGWGQPQQPAAPSHSGMPPQQHPANEPPMDFDDDIPFAPFGHSVARHALYVLS

SEQ ID NO: 75867 - protein, 202 aa, Salmonella typhi
MLENLNNSLFYFINATPDSAQWIISLAIFIAKDVINIVPLLAVVLWLWGPRDRVCAQRQLIVKIGIALIISLAVSWTMGHLFPHDRPFVDHIGYNFLHHAADDSFPSDHGTVIFTFALAFLFWHRLWSGIVMMAIAMTIAWSRVYLGVHWPLDMIGALLVAMLGCLSAQLIWQWYGAPLYQALQRCYRFCFALPIRKGWVRD

SEQ ID NO: 75868 - protein, 186 aa, Salmonella typhi
MRQKGGVMTSRLQVIQGDITQLSVDAIVNAANASLMGGGGVDGAIHRAAGPALLDACKLIRQQQGECQTGHAVITPAGKLSAKAVIHTVGPVWRGGEHQEAELLEEAYRNCLLLAEANHFRSIAFPAISTGVYGYPRAQAAEVAVRTVSDFITRYALPEQVYFVCYDEETARLYARLLTQQGDDPA

SEQ ID NO: 75869 - protein, 847 aa, Salmonella typhi
MNKTTEYIDALLLSEREKAALPKTDIRAVHQALDAEHRTYSREDDSPQGSVKARLEHAWPDSLAKGQLIKDDEGRDQLQAMPKATRSSMFPDPWRTNPVGRFWDRLRGRDVTPRYVSRLTKEEQASEQKWRTVGTIRRYILLILTLAQTVVATWYMKTILPYQGWALINPMDMVGQDIWVSFMQLLPYMLQTGILILFAVLFCWVSAGFWTALMGFLQLLIGRDKYSISASTVGDEPLNPEHQTALIMPICNEDVSRVFAGLRATWESVKATGNAAHFDVYILSDSYNPDICVAEQKAWMELIAEVQGEGQIFYRRRRRRMKRKSGNIDDFCRRWGNQYSYMVVLDADSVMSGECLSGLVRLMEANPNAGIIQSSPKASGMDTLYARCQQFATRVYGPLFTAGLHFWQLGESHYWGHNAIIRVKPFIEHCALAPLPGEGSFAGSILSHDFVEAALMRRAGWGVWIAYDLPGSYEELPPNLLDELKRDRRWCHGNLMNFRLFLVKGMHPVHRAVFLTGVMSYLSAPLWFMFLALSTALQVVHALTEPQYFLQPRQLFPVWPQWRPELAIALFASTMVLLFLPKLLSIMLIWCKGTKEYGGFWRVTLSLLLEVLFSVLLAPVRMLFHTVFVVSAFLGWEVVWNSPQRDDDSTPWGEAFMRHGSQLLLGLVWAVGMAWLDLRFLFWLAPIVFSLILSPFVSVISSRSTVGLRTKRWKLFLIPEEYSPPQVLVDTDKYLEMNRRRILDDGFMHAVFNPSLNALATAMATARHRASKVLEIARDRHVEQALNETPEKLNRDRRLVLLSDPVTMARLHYRVWNAPERYSSWVNHYQSLVLNPQALQGRTSSAG

SEQ ID NO: 75870 - protein, 404 aa, Salmonella typhi
MSPSDVPINWKRNLTVTWLGCFLTGAAFSLVMPFLPLYVEQLGVTGHSALNMWSGLVFSITFLFSAIASPFWGGLADRKGRKIILLRSALGMAIVMLLMGMAQNIWQFLILRALLGLLGGFIPNANALIATQVPRHKSGWALGTLSTGGVSGALLGPLAGGLLADHYGLRPVFFITASVLFICFLLTFFFIRENFLPVSKKEMLHVREVVASLKNPRLVLSLFVTTLIIQVATGSIAPILTLYVRELAGNVSNIAFISGMIASVPGVAALLSAPRLGKLGDRIGPEKILIVALIISVLLLIPMSFVQTPWQLALLRFLLGAADGALLPAVQTLLVYNSTNQIAGRIFSYNQSFRDIGNVTGPLMGAAISASYGFRAVFCVTAGVVLFNAIYSWNSLRRRRLAIE

SEQ ID NO: 75871 - protein, 281 aa, Salmonella typhi
MNNLPVVRSPWRILILVLGFTFLYAPMLMLVIYSFNSSKLVTVWAGWSTRWYGELFRDTAMMSAVGLSLTIAACAATMAVVLGTIAAVVMVRFGRFRGANGFAFMITAPLVMPDVITGLSLLLLFVALGHTIGWPSDRGMLTIWLAHVTFCTAYVAVVIASRLRELDRSIEEAAMDLGAAPLKVFFVITLPMIMPAVISGWLLAFTLSLDDLVIASFVSGPGATTLPMLVFSSVRMGVNPEINALATLILGVVGIIGFIAWYLMARAEKQRIRDIQRARRG

SEQ ID NO: 75872 - protein, 350 aa, Salmonella typhi
MPVLHNRISNDELKAKMLAESEPRTTISFYKYFTIASPQQTRDALYQVFTALDVFGRVYLAHEGINAQISVPQSKVETFRQQLYTFDPALDGVRLNIALEDDGKSFWVLRMKVRDRIVADGIDDPSFDASNVGDYLKAADVNAMLDDPDAVFIDMRNHYEYEVGHFENALEIPADTFREQLPKAVEMLREHADKKIVMYCTGGIRCEKASAWMKHNGFNKVWHIEGGIIEYARRAREQGLPVRFIGKNFVFDERMGERISDEVIAHCHQCGVSCDSHTNCKNDGCHLLFIQCPQCASKFNGCCSEQCCEELALPEEEQRRRRAGRENGNKIFNKSRGRLNSKLSIPDPAE

SEQ ID NO: 75873 - protein, 157 aa, Salmonella typhi
MGFIKQSTSSHARLNVPTLVQVAAMAIILIRGLDVLMIMNTLGIRGMGEFIHRSVQTWSLTLVFLASLVLVFIEIYCAFSLVKGRSWARWVYLAAQIIVSGYLWAASLGYGYPELFSIAGESKRDILHSLVMQKLPDLLILFLLFIPAPSRRFFRLQ

SEQ ID NO: 75874 - protein, 191 aa, Salmonella typhi
MKKNLLGFTLASLLFTTGSAVAAEYKIDKEGQHAFVNFRIQHLGYSWLYGTFKDFDGTFTFDEKNPSADKVNVTINTNSVDTNHAERDKHLRSAEFLNVAKFPQATFTSTSVKKEGDELDITGNLTLNGVTKPVTLEAKLMGQGDDPWGGKRAGFEAEGKIKLKDFNITTDLGPASQEVELIISVEGVQQK

SEQ ID NO: 75875 - protein, 37 aa, Salmonella typhi
MRRLFHFLMNNIREHFMLYVILWSLLAVMDIVYLLFF

SEQ ID NO: 75876 - protein, 372 aa, Salmonella typhi
MKYDLIIIGSGSVGAAAGYYATRAGLKVLMTDAHMPPYQQGSHHGDTRLIRHAYGEGEKYVPLVLRAQTLWDELSTHNEEPIFVRSGVVNLGPADSAFLANVARSAQQWQLNVERLDATALMTRWPEIRVPDNYIGLFEADSGFLRSELAITTWLRLAREAGCAQLFNSPVSHIHHDDNGVTIETSEGCYHASKALISAGTWVKTLVPELPVQPVRKVFAWFKADGRYSTKNRFPAFTGEMPNGDHYYGFPAENDELKIGKHNGGQRIQAPEERKPFAAVASDGAEAFPFLRNVLPGIGGCLHGAACTYDNSPDEDFIIDTLPGHENTLVITGLSGHGFKFAPVLGEIAADFALGKTPSFDLTPFRLSRFSQ

SEQ ID NO: 75877 - protein, 81 aa, Salmonella typhi
MRIEVTIAKTSPLPAGAIGALAGELSRRISHHFPENLGNVTVRYATANNLSVIGASKEDKERISEILQETWESADDWFINE

SEQ ID NO: 75878 - protein, 348 aa, Salmonella typhi
MTAPSQVLKIRRPDDWHVHLRDGDMLKTVVPYTSEIYGRAIVMPNLASPITTVDAAIAYRQRILDAVPAGHDFTPLMTCYLTDSLDADELERGFHEGVFTAAKLYPANATTNSSHGVTSVDAIMPVLERMEKLGMPLLVHGEVTHADVDIFDREARFIDTVMEPLRQRLTALKVVFEHITTKDAAQYVRDGSYNLAATITPQHLMFNRNDMLVGGIRPHLYCLPILKRNIHQQALRDLVASGFTRAFLGTDSAPHSRHRKETRCGCAGCFNAPSALGSYAAVFEEMNALAHFEAFCSLNGPQFYGLPVNTGWVELVRDEQQIPENIALADDSLVPFLAGETVRWSVKK

SEQ ID NO: 75879 - protein, 243 aa, Salmonella typhi
MKKLVLAALLASFATGSIAAEKINFGVSATYPPFESLDASNKIVGFDIDLATALCKQMQAECTFTNHAFDSLIPALKFRKYDAVISGMDITPERSKQVAFSNPYYANSALVIAKKDTYKTFTDLKGKRIGMENGTTHQKYLQDKHPEVKTVAYDSYQNAIIDLKNGRIDGVFGDTAVVNEWLKTNPQLGPATEKVTDPQYFGTGLGIAVRPDNKALLEKLNNALAAIKADGTYQKISDQWFPQ

SEQ ID NO: 75880 - protein, 238 aa, Salmonella typhi
MNEFFPLASAAGMTVGLAVCALIIGLALAMFFAVWESVKWRPIAWIGSALVTILRGLPEILVVLFIYFGSSQLLLTLSDGFTLHLGFTQIPVQMEIENFDVSPFLCGVIALSLLYAAYASQTLRGALKAVPSGQWESGQALGLSKTAIFFRLVMPQMWRHALPGLGNQWLVLLKDTALVSLISVNDLMLQTKSIATRTQEPFNWYIIAAAIYLVITLISQYILKRIDLRATRFERRPD

SEQ ID NO: 75881 - protein, 208 aa, Salmonella typhi
MSAGATCCFVSRLGHRQHAKERHEKVFFAAALVVSGLLVGCNQLTQYTISEQEINQALEKRNNFSKDIGLPGIADAHIVLTNLASQIGREEPNKVTLTGDARLDMNSLFGSQKATMKLKLKALPVFDKEKGAIYLQEMEVVDATVTPEKMQSVLQTLLPYLNQSLRSYFNQRPAYVLREDSSKGEALAKKLAKGIEVKPGEIVIPFTN

SEQ ID NO: 75882 - protein, 337 aa, Salmonella typhi
MKVLVTGATSGLGRNAVEFLRNKGISVRATGRNEAMGKLLEKMGAEFVHADLTELVSSQAKVMLAGIDTLWHCSSFTSPWGTQQAFDLANVRATRRLGEWAVAWGVRNFIHISSPSLYFDYHHHRDIKEDFRPHRFANEFARSKAAGEEVINLLAQANPQTRFTVLRPQSLFGPHDKVFIPRLAHMMHHYGSVLLPHGGSALVDMTYYENAIHAMWLASQPGCDHLPSGRAYNITNGENRTLRSIVQKLIDELTIDCRIRSVPYPMLDMIARSMERFGKKSAKEPPLTHYGVSKLNFDFTLDTTRAQDELGYQPIVTLDEGIERTAAWLRDHGNLPR

SEQ ID NO: 75883 - protein, 307 aa, Salmonella typhi
MRTLRIGIVVLGGIAQKAWLPVLTNTAGWTLQGAWSPSRDKALRICESWRIPYVDSLANLASGCDAVFVHSSTASHYAVVSELLNAGVHVCVDKPLAENLRDAERLVALAAQKKLTLMVGFNRRFAPLYRELKTRLGTAASLRMDKHRTDSIGPHDLRFTLLDDYLHVVDTVLWLAGGEARLASGTLLTSESGEMCYAEHHFSADKLQITTSMHRRAGSQRESVQAVTDGGLYDVTDMREWREERGQGILIKPIPGWQTTLEQRGFVGCARHFIDCVQNQTVPETAGEQAILAQRVVEALWRDAISE

SEQ ID NO: 75884 - protein, 497 aa, Salmonella typhi
MFSRVLGFARDAIVARIFGAGMATDAFFVAFKLPNLLRRIFAEGAFSQAFVPILAEYKSKQGEEATRIFVAYVSGLLTLALAVVTVAGMLAAPWVIMVTAPGFADTADKFALTTQLLRITFPYILLISLASLVGAILNTWNRFSIPAFAPTFLNISMIGFALFAAPYFNPPVLALAWAVTVGGVLQLVYQLPYLKKIGMLVLPRINFHDTGAMRVVKQMGPAILGVSVSQISLIINTIFASFLASGSVSWLYYADRLMEFPSGVLGVALGTILLPSLSKSFASGNHDEYCRLMDWGLRLCFLLALPSAVALGILAKPLTVSLFQYGKFTAFDAAMTQRALIAYSVGLIGLIVVKVLAPGFYSRQDIKTPVKIAIVTLIMTQLMNLAFIGPLKHAGLSLSIGLAACLNASLLYWQLRKQNIFTPQPGWMWFLMRLIISVLVMAAVLFGVLHIMPEWSQGSMLWRLLRLMAVVIAGIAAYFAALAVLGFKVKEFVRRTA

SEQ ID NO: 75885 - protein, 232 aa, Salmonella typhi; identical to SEQ ID NO: 75145

SEQ ID NO: 75886 - protein, 194 aa, Salmonella typhi
MPRLILASTSPWRRALLEKLTIPFECAAPDVDETPMPGEAPRQLVLRLAQAKAQSLAARFPNHLIIGSDQICVLDGEITGKPLTEEKARQQLAKASGSIVTFYTGLALYNSASGHLQTEVEPFDVHFRHLSEAEIDDYVRKEHPLHCAGSFKSEGLGIALFERLEGRDPNTLIGLPLIALCQMLRREEMNPLNA

SEQ ID NO: 75887 - protein, 317 aa, Salmonella typhi
MYTKIIGTGSYLPEQVRTNADLEKMVETSDEWIVTRTGIRERHIAAPNETVATMGFTAANRAIEMAGIDKDQIGLIVVATTSATHAFPSAACQIQSMLGIKGCPAFDVAAACAGFTYALSIADQYVKSGVVKHALVVGSDVLARTCDPGDRGTIIIFGDGAGAAVLSASEEPGIISTHLHADGRYGELLTLPNADRVNPDNPIYLTMAGNEVFKVAVTELAHIVDETLAANNLDRSELDWLVPHQANLRIISATAKKLGMSMDNVVVTLDRHGNTSAASVPCALDEAVRDGRIKAGQLVLLEAFGGGFTWGSALIRF

SEQ ID NO: 75888 - protein, 309 aa, Salmonella typhi
MTQFAFVFPGQGSQSVGMLAEMAANYPIVEETFAEASAALGYDLWALTQQGPAEELNKTWQTQPALLTASVALWRVWQQQGGKMPALMAGHSLGEYSALVCAGVINFADAVRLVEMRGKFMQEAVPEGTGGMSAIIGLDDASIAKACEESAEGQVVSPVNFNSPGQVVIAGHKEAVERAGAACKAAGAKRALPLPVSVPSHCALMKPTADKLAVELAKITFSAPTVPVVNNVDVKCETDAAAIRDALVRQLYNPVQWTKSVEFIAAQGVEHLYEVGPGKVLTGLTKRIVDTLTASALNEPAALSAALTQ

SEQ ID NO: 75889 - protein, 244 aa, Salmonella typhi; identical to SEQ ID NO: 75152

SEQ ID NO: 75890 - protein, 413 aa, Salmonella typhi
MSKRRVVVTGLGMLSPVGNTVESTWKALLAGQSGISLIDHFDTSAYATKFAGLVKDFNCDDIISRKEQRKMDAFIQYGIVAGVQAMQDSGLEVTEENASRIGAAIGSGIGGLGLIEENHSSLVKGGPRKISPFFVPSTIVNMVAGHLTIMYGLRGPSISIATACTSGVHNIGHAARIIAYGDADAMVAGGAEKASTPLGVGGFGAARALSTRNDNPQAASRPWDKERDGFVLGDGAGMLVLEEYEHAKARSAKIYAEIVGFGMSSDAYHMTSPPENGAGAALAMVNALRDAAIEPAQIGYVNAHGTSTPAGDKAETQAVKSVFGDAASRVMVSSTKSMTGHLLGAAGAVESIFSILALRDQAIPPTINLDNPDEGCDLDFVPHEARQVSDLEYALCNSFGFGGTNGSLIFKKI

SEQ ID NO: 75891 - protein, 269 aa, Salmonella typhi; identical to SEQ ID NO: 75155

SEQ ID NO: 75892 - protein, 213 aa, Salmonella typhi; identical to SEQ ID NO: 75156

SEQ ID NO: 75893 - protein, 265 aa, Salmonella typhi
MFLVDSHCHLDGLDYQSLHKDVDDVLAKAAARDVKFCLAVATTLPGYRHMRELVGKRDNVVFSCGVHPLNQDEVYDVEELRLLAAEDDVVAMGETGLDYFYTPETKIRQQASFIHHIQIGRELHKPVIVHTRDARADTLAILREEKVTDCGGVLHCFTEDRETAGKLLDLGFYISFSGIVTFRNAEQLRDAARYVPLDRLLVETDSPYLAPVPHRGKENQPAMVRDVAEYMAVLKGVAVEELAQITTDNFARLFHIDASRLSSIR

SEQ ID NO: 75894 - protein, 341 aa, Salmonella typhi; identical to SEQ ID NO: 73022

SEQ ID NO: 75895 - protein, 434 aa, Salmonella typhi
MTTPLKKIVIVGGGAGGLEMATQLGHKLGRKKKAKITLVDRNHSHLWKPLLHEVATGSLDEGVDALSYLAHARNHGFQFQLGSVMDIDREAKTITIAELRDEKGELLVPERKIAYDTLVMALGSTSNDFNTPGVKEHCIFLDNPHQARRFHQEMLNLFLKYSANLGANGKVNIAIVGGGATGVELSAELHNAVKQLHSYGYKGLTNDALNVTLVEAGERILPALPPRISSAAHNELTKLGVRVLTQTMVTSADEGGLHTKEGEYIQADLMVWAAGIKAPDFMKEIGGLETNRINQLVVEPTLQTTRDPDIYAIGDCASCARPEGGFVPPRAQAAHQMATCAMNNILAQMNGKPLKAYQYKDHGSLVSLSNFSTVGSLMGNLTRGSMMIEGRIARFVYISLYRMHQIALHGYFKTGLMMLVGSINRVIRPRLKLH

SEQ ID NO: 75896 - protein, 211 aa, Salmonella typhi
MTTDTTSCAKKSRGRPKVFDREAALDKAMTLFWQHGYEATSLADLVEATGAKAPTLYAEFTNKEGLFRAVLDRYITRFASKHEAQLFCEEKSVESALEDYFTEIAACFTSTDTPAGCFMINTSATLAASSRDIARTVKSRHAMQEQTLIQFLRQHQERGEIPAHCNPQALAEYINCILQGMSISAREGATFEQLMQITRTTLRIWPELLKS

SEQ ID NO: 75897 - protein, 263 aa, Salmonella typhi
MFNNTRLSRWWALLALTATIMLALPAQANTWPLPPPGSRLVGENKFHVVEDDGGSLEAIAKKYNVGFLALLQANPGIDPYVPRAGSVLTIPLQTLLPDAPREGIVINLAELRLYYYQPGKNTVTVYPIGIGQLGGDTLTPTMVTTISDKRANPTWTPTTNIRARYKAQGIDLPAVVPAGPDNPMGHHAIRLAAYGGVYLLHGTNAGFGIGMRVSSGCIRLRDGDIETLFRQVTPGTKVNIINTPIKASVEPGGVRLVEVHQSL

SEQ ID NO: 75898 - protein, 1148 aa, Salmonella typhi
MPEKQRYTLPTKAGDQRQLGELTGAACATLVAEIAERHAGPVVLIAPDMQNALRLHDEIRQFTDQMVMNLADWETLPYDSFSPHQEIISSRLSTLYQLPSMQRGVLIVPVNTLMQRVCQHSYLHGHALVMKKGQRLSRDALRAQLDSAGYRHVDQVMEHGEYATRGALLDLFPMGSEQPYRLDFFDDEIDSLRLFDADTQRTLEEVEAINLLPAHEFPTDKAAIELFRSQWRDTFEVKRDAEHIYQQVSKGTLPAGIEYWQPLFFSEPLPPLFSYFPANTLVVNTGSLETSAERFQADTLARFENRGVDPMRPLLPPEALWLRVDGLFSELKRWPRLQLKTDHLPEKAANTNLGFQKLPDLAIQAQQKAPLDALRKFLESFSGPVIFSVESEGRREALGELLARIKIAPKRILRLDEAQDAGRYLMIGAAEHGFIDTQRNLALICESDLLGERVARRRLDSRRTINPDTLIRNLAELHVGQPVVHLEHGVGRYAGMTTLEAGGIKGEYLMLTYANDAKLYVPVSSLHLISRYAGGAEESAPLHKLGGDAWSRARQKAAEKVRDVAAELLDIYAQRAAKEGFAFKHDREQYQLFCDSFPFETTPDQAQAINAVLSDMCQPLAMDRLVCGDVGFGKTEVAMRAAFLAVENHKQVAVLVPTTLLAQQHYDNFRDRFANWPVRIEMLSRFRSAKEQTQILAEAAEGKIDILIGTHKLLQSDVKLRDLGLLIVDEEHRFGVRHKERIKAMRADVDILTLTATPIPRTLNMAMSGMRDLSIIATPPARRLAVKTFVREYDSLVVREAILREILRGGQVYYLYNDVENIQKAAERLAELVPEARIAIGHGQMRERELERVMNDFHHQRFNVLVCTTIIETGIDIPTANTIIIERADHFGLAQLHQLRGRVGRSHHQAYAWLLTPHPKAMTADAQKRLEAIASLEDLGAGFALATHDLEIRGAGELLGEEQSGSMETIGFSLYMELLENAVDALKAGREPSLEDLTSQQTEVELRMPSLLPDDFIPDVNTRLSFYKRIASAKNENELEEIKVELIDRFGLLPDPARNLLDIARLRQQAQKLGIRKLEGNEKGGTIEFAEKNHVDPAWLIGLLQKQPQHFRLDGPTRLKFIQDLSERKTRIDWVRQFMQQLEENAIA

SEQ ID NO: 75899 - protein, 436 aa, Salmonella typhi
MSAFFRITLTNSYGSDIYAFRFRLYTRDFANSNQTDYMYQPVALFIGLRYMRGRAADRFGRFVSWLSTIGITLGVMALVTVLSVMNGFERELQNNILGLMPQAILSAEHGSLNPNQMPEKAVNLQGVNRIAPLTTGDVVLQSARSVAVGVMLGIDPAQKDPLTPYLVNVKQSELQPGKYNVILGEQLAGQLGVNRGDQIRLMVPSASQFTPMGRLPSQRLFTVIGTFAANSEVDGYEMLVNIQDASRLMRYPAGNITGWRLWLDEPLQVDTLSQQTLPQGTKWQDWRERKGELFQAVRMEKNMMGLLLSLIVAVAAFNIITSLGLMVMEKQGEVAILQTQGLTPRQIMMVFMVQGASAGIIGALLGAALGALLASQLNNLMPIIGAFLDGAALPVAIEPLQVIVIALVAMAIALLSTLYPSWRAAATQPAEALRYE

SEQ ID NO: 75900 - protein, 348 aa, Salmonella typhi
MKKWSRHLLAAGALALGMSAAHASDNDTLYFYNWTEYVPPGLLEQFTKETGIKVIYSTYESNETMYAKLKTYKDGAYDLVVPSTYYVDKMRKEGMIQKIDKSKLTNFHNLDPEMLNKPFDPNNDYSVPYIWGATAIGVNSDAIDPKTITSWADLWKPEYKNSLLLTDDAREVFQMALRKLGYSGNTTDPKEIEAAYEELKKLMPNVAAFNSDNPANPYMEGEVNLGMVWNGSAFVARQAGTPLEVVWPKEGGIFWMDSLAIPANAKNKEGALKLINFLLRPDVAKEVAETIGYPTPNLAARKLLSPEVANDKSLYPDAQTISKGEWQNDVGDASAIYEEYYQKLKAGR

SEQ ID NO: 75901 - protein, 409 aa, Salmonella typhi
MDKLLERFLHYVSLDTQSKSGVRQVPSTEGQWKLLRLLKQQLEEMGLVNITLSEKGTLMATLPANVEGDIPAIGFISHVDTSPDFSGKNVNPQIVENYRGGDIALGIGDEVLSPVMFPVLHQLLGQTLITTDGKTLLGADDKAGVAEIMTALAVLKGNPIPHGEIKVAFTPDEEVGKGAKHFDVEEFGAQWAYTVDGGGVGELEFENFNAASVNIKIVGNNVHPGTAKGVMVNALSLAARIHAEVPADEAPETTEGYEGFYHLASMKGTVDRAEMHYIIHDFDRKQFEARKRKMMEIAKKVGKGLHPDCYIELVIEDSYYNMREKVVEHPHILDIAQQAMRDCHITPEMKPIRGGTDGAQLSFMGLPCPNLFTGGYNYHGKHEFVTLEGMEKAVQVIVRIAELTGKRGQ

SEQ ID NO: 75902 - protein, 487 aa, Salmonella typhi
MNKFARHFLPLSLRVRFLLATAGVVLVLSLAYGIVALVGYSVSFDKTTFRLLRGESNLFYTLAKWENNKISVELPENLDMQSPTMTLIYDETGKLLWTQRNIPWLIKSIQPEWLKTNGFHEIETNVDATSTLLSEDHSAQEKLKEVREDDDDAEMTHSVAVNIYPATTRMPQLTIVVVDTIPIELKRSYMVWSWFVYVLAANLLLVIPLLWIAAWWSLRPIEALAREVRELEDHHREMLNPETTRELTSLVRNLNQLLKSERERYNKYRTTLTDLTHSLKTPLAVLQSTLRSLRNEKMSVSKAEPVMLEQISRISQQIGYYLHRASMRGSGVLLSRELHPVAPLLDNLISALNKVYQRKGVNISMDISPEISFVGEQNDFVEVMGNVLDNACKYCLEFVEISARQTDDHLHIFVEDDGPGIPHSKRSLVFDRGQRADTLRPGQGVGLAVAREITEQYAGQIIASDSLLGGARMEVVFGRQHPTQKEE

SEQ ID NO: 75903 - protein, 456 aa, Salmonella typhi
MELSSLTAVSPVDGRYGDKVSALRGIFSEYGLLKFRVQVEVRWLQKLAAHAAIKEVPAFAADANGYLDTLVANFNEEDAARIKTIERTTNHDVKAVEYFLKEKAAAIPALHDVSEFIHFACTSEDINNLSHALMLKTARDEVILPYWRQVINAVKDLATQYRDIPLLSRTHGQPATPSTLGKEMANVAYRMERQFRQLNQVEILGKINGAVGNYNAHIAAYPEVDWHQFSEEFVTSLGIQWNPYTTQIEPHDYIAELFDCIARFNTILIDFDRDVWGYIALNHFKQKTIAGEIGSSTMPHKVNPIDFENSEGNLGLSNAVLHHLANKLPVSRWQRDLTDSTVLRNLGVGIGYALIAYQSTLKGVSKLEVNRDHLLDELDHNWEVLAEPIQTVMRRYGIEKPYEKLKELTRGKRVDAEGMKQLIDSLALPEAEKTRLKAMTPANYIGRAVNLVDELK

SEQ ID NO: 75904 - protein, 368 aa, Salmonella typhi; identical to SEQ ID NO: 73537

SEQ ID NO: 75905 - protein, 197 aa, Salmonella typhi
MKPVFDENGLATVPGDMRCYYYDAVTSEYTGWSDEYINTGVSMPACSTGIDPGEYIPGRVAVFTGKGWSHEEDHRNETVYSTENGAAVTVDYIGAIKDGYVTLSPLTPYDKWDGEKWVTDTEAQHSAAVEAAEAQRQSLIDAAMASISLIQLKLQAGRKLTQPENTRLNAVLDYIDAVTATDTSTAPDVIWPELPEA

SEQ ID NO: 75906 - protein, 146 aa, Salmonella typhi
MQKYIFSADKNAFFPVELKIAYQESGEWPDDGIEIDDTVAAEFMKEAPEGKYRGVIDGMPAWIDIPPPTHEEQIAAAELEKQQLINQVNEYINSKQWPGKAAIGRLKGEELAQYNLWLDYLDALELVDTSGAPDIEWPTPPAVQAR

SEQ ID NO: 75907 - protein, 160 aa, Salmonella typhi; identical to SEQ ID NO: 73444

SEQ ID NO: 75908 - protein, 72 aa, Salmonella typhi
MMICPLCGSAAHTRSSFQVSSLTKERYNQCQNINCSHTFVTHETFVRSIATPKESNPVQPHPMKSGQVALSL

SEQ ID NO: 75909 - protein, 718 aa, Salmonella typhi
MTRAAPDVEEVLSERALSQWAQAISHVAGHYRVACSPGSIQANAPWFRGKSRTTALTQLARQAGLSFHAPDIDKTAFSQWRLPLVVELRDGQLLVIEHVNGEDAVDVFVIEEEGQRNRLTLSELLPEILYVAALRPLSALKDSRVDRYISRFKPDWMRELVLQDIRPYLPVMVAAFLINVLSLAGIVFSMQVYDRVIPAQSYPTLYVLSFGVLVAVLFGFLLREARTHIMDVLGKRADMRISDRVFGHALRLRNSAIPRSTGSFISQLRELEQIREMITSSTLATIVDLPFFFLFMIVLAIIAPPLAWIAPVAALLMILPGVALQKKLAVLANQAAHEATLRNAVLVESVQGLEDIKLMQAENRFLQQWNSYIRITGESGLRTRKLTQRLISWGMSVQSLVYAAVIMFGAPMVIEGSMTTGAVVAASMLGSRMIAPMANLCGVLARWQQVKAAKMGLDNIMQLPTETQHDDSLIHRDILHGHYLFENAQFRYHNDDQRIPLRLVRLEIMPGERIAILGRNGAGKSTLLQAMAGGLEMIQGDARLDNLSLSHIDMADLRRNIGFLSQNARLFFGTLRENLTLGAPHANDEQIFDALEVSGGAVFVRRLAKGLDHPIMEGGNGLSGGQRQSLLLARMLLRSPNIVLLDEPSASLDEHTEREFIQRLHQWLGNRTLVVATHRVPILELVERVVVLKEGQLVMDAPKAQALNADRMQSHRRE

SEQ ID NO: 75910 - protein, 72 aa, Salmonella typhi
MMICPLCGSAAHTRSSFQVSSLTKERYNQCQNINCSHTFVTHETFVRSIATPKESNPVQPHPHKFKQVGLPI

SEQ ID NO: 75911 - protein, 350 aa, Salmonella typhi
MQRSLDSLAGMATSAFGAGTSAAMRQATSPKTILQHIINFFTCGGIRRRNETQYQELIETMAETLKSSMSDRGAPLPENIILDDVDGCRVEFNLPGENNEAGQVIVRVSKGDNSETREIPLASFEKICRALLFRCEFSLPQDSVILTAQGGMNLKGAVLTGANLTAENLCDADLSGADLEGAILFMADCDGANFKGANLSGASLGDSNLTNACLEDSIMCGATLDRANLTGANLQHTSLLGCSMVECNCSGANMDHANVSGSTLIRADMSGATLKGATIMAAIMEGAVLTRANLQKASFTATNLDGADLSEANLRNTSFKDCTLTDLRTEDATMSTSTQTLFNVFYSENI

SEQ ID NO: 75912 - protein, 211 aa, Salmonella typhi
MYQPDFPTVPFRLGLYPVVDSVAWIERLLEAGVRTIQLRIKDKRDEEVEADVIAAIALGRCYDARLFINDYWRLAIKHNAYGVHLGQEDLETTDLKAIQAAGLRLGVSTHDDMEIDIALAAKPSYIALGHVFPTQTKQMPSAPQGLAQLARHIERLADYPTVAIGGISLERAPAVLATGVGSIAVVSAITQAADWRAATAQLLAIAGVGDE

SEQ ID NO: 75913 - protein, 252 aa, Salmonella typhi
MNDRDFMRYSRQILLGDIAIEGQQKLLNSHVLIVGLGGLGSPAALYLAGAGIGTLTLADDDDVHLSNLQRQILFTTDDIARSKSQVAQQHLTRLNPDIELVSLQQRLKGDALRHAVARADVVLDCTDNMATRQEINAACVALNTPLITASAVGFGGQVMVLTPPWEQGCYRCLWPDDVEPERNCRTAGIVGPVVGVMGTLQALEAIKLLSGIETPSGELRLFDGKTSQWRSLALRRASGCPVCGGRHANSIQ

SEQ ID NO: 75914 - protein, 577 aa, Salmonella typhi
MNIQALLSEKVSQAMIAAGAPADCEPQVRQSAKVQFGDYQANGMMAVAKKLGMAPRQLAEQVLTHLDLSGIASKVEIAGPGFINIFLEPAFLAEQVQQALTSDRLGVSQPTRQTIVVDYSAPNVAKEMHVGHLRSTIIGDAAVRTLEFLGHHVIRANHVGDWGTQFGMLIAWLEKQQQENAGDMALADLEGFYRDAKKHYDEDETFAERARNYVVKLQSGDTYFREMWRKLVDITMTQNQITYDRLNVTLTRDDVMGESLYNPMLPGIVADLKAKGLAVESEGATVVFLDEFKNKEGDPMGVIIQKKDGGYLYTTTDIACAKYRYETLHADRVLYYIDSRQHQHLMQAWTIVRKAGYVPDSVPLEHHMFGMMLGKDGKPFKTRTGGTVKLADLLDEALERARRLVAEKNPDMPADELEKLANAVGIGAVKYADLSKNRTTDYIFDWDNMLAFEGNTAPYMQYAYTRVLSVFRKADIDEQALASAPVIISEDREAQLAARLLQFEETLTVVAREGTPHVMCAYLYDVAGLFSGFYEHCPILSAENDAVRNSRLKLAQLTAKTLKLGLDTLGIETVERM

SEQ ID NO: 75915 - protein, 1407 aa, Salmonella typhi
MKDLLKFLKAQTKTEEFDAIKIALASPDMIRSWSFGEVKKPETINYRTFKPERDGLFCARIFGPVKDYECLCGKYKRLKHRGVICEKCGVEVTQTKVRRERMGHIELASPTAHIWFLKSLPSRIGLLLDMPLRDIERVLYFESYVVIEGGMTNLERQQILTEEQYLDALEEFGDEFDAKMGAEAIQALLKSMDLEQECETLREELNETNSETKRKKLTKRIKLLEAFVQSGNKPEWMILTVLPVLPPDLRPLVPLDGGRFATSDLNDLYRRVINRNNRLKRLLDLAAPDIIVRNEKRMLQEAVDALLDNGRRGRAITGSNKRPLKSLADMIKGKQGRFRQNLLGKRVDYSGRSVITVGPYLRLHQCGLPKKMALELFKPFIYGKLELRGLATTIKAAKKMVEREEAVVWDILDEVIREHPVLLNRAPTLHRLGIQAFEPVLIEGKAIQLHPLVCAAYNADFDGDQMAVHVPLTLEAQLEARALMMSTNNILSPANGEPIIVPSQDVVLGLYYMTRDCVNAKGEGMVLTGPKEAERIYRAGLASLHARVKVRITEYEKDENGEFVAHTSLKDTTVGRAILWMIVPKGLPFSIVNQALGKKAISKMLNTCYRILGLKPTVIFADQTMYTGFAYAARSGASVGIDDMVIPEKKHEIISEAEAEVAEIQEQFQSGLVTAGERYNKVIDIWAAANDRVSKAMMDNLQTETVINRDGQEEQQVSFNSIYMMADSGARGSAAQIRQLAGMRGLMAKPDGSIIETPITANFREGLNVLQYFISTHGARKGLADTALKTANSGYLTRRLVDVAQDLVVTEDDCGTHEGILMTPVIEGGDVKEPLRDRVLGRVTAEDVLKPGTADILVPRNTLLHEQWCDLLEANSVDAVKVRSVVSCDTDFGVCAHCYGRDLARGHIINKGEAIGVIAAQSIGEPGTQLTMRTFHIGGAASRAAAESSIQVKNKGSIKLSNVKSVVNSSGKLVITSRNTELKLIDEFGRTKESYKVPYGAVMAKGDGEQVAGGETVANWDPHTMPVITEVSGFIRFTDMIDGQTITRQTDELTGLSSLVVLDSAERTTGGKDLRPALKIVDAQGNDVLIPGTDMPAQYFLPGKAIVQLEDGVQISSGDTLARIPQESGGTKDITGGLPRVADLFEARRPKEPAILAEIAGIVSFGKETKGKRRLVITPVDGSDPYEEMIPKWRQLNVFEGERVERGDVISDGPEAPHDILRLRGVHAVTRYIVNEVQDVYRLQGVKINDKHIEVIVRQMLRKATIESAGSSDFLEGEQVEYSRVKIANRELEANGKVGATFSRDLLGITKASLATESFISAASFQETTRVLTEAAVAGKRDELRGLKENVIVGRLIPAGTGYAYHQDRMRRRAAGEQPATPQVTAEDASASLAELLNAGLGGSDNE

SEQ ID NO: 75916 - protein, 1342 aa, Salmonella typhi
MVYSYTEKKRIRKDFGKRPQVLDVPYLLSIQLDSFQKFIEQDPEGQYGLEAAFRSVFPIQSYSGNSELQYVSYRLGEPVFDVQECQIRGVTYSAPLRVKLRLVIYEREAPEGTVKDIKEQEVYMGEIPLMTDNGTFVINGTERVIVSQLHRSPGVFFDSDKGKTHSSGKVLYNARIIPYRGSWLDFEFDPKDNLFVRIDRRRKLPATIILRALNYTTEQILDLFFEKVVFEIRDNKLQMELIPERLRGETASFDIEANGKVYVEKGRRITARHIRQLEKDDIKHIEVPVEYIAGKVVSKDYVDESTGELICAANMELSLDLLAKLSQSGHKRIETLFTNDLDHGPYISETVRVDPTNDRLSALVEIYRMMRPGEPPTREAAESLFENLFFSEDRYDLSAVGRMKFNRSLLRDEIEGSGILSKDDIIDVMKKLIDIRNGKGEVDDIDHLGNRRIRSVGEMAENQFRVGLVRVERAVKERLSLGDLDTLMPQDMINAKPISAAVKEFFGSSQLSQFMDQNNPLSEITHKRRISALGPGGLTRERAGFEVRDVHPTHYGRVCPIETPEGPNIGLINSLSVYAQTNEYGFLETPYRRVVDGVVTDEIHYLSAIEEGNYVIAQANSNLDDEGHFVEDLVTCRSKGESSLFSRDQVDYMDVSTQQVVSVGASLIPFLEHDDANRALMGANMQRQAVPTLRADKPLVGTGMERAVAVDSGVTAVAKRGGTVQYVDASRIVIKVNEDEMYPGEAGIDIYNLTKYTRSNQNTCINQMPCVSLGEPVERGDVLADGPSTDLGELALGQNMRVAFMPWNGYNFEDSILVSERVVQEDRFTTIHIQELACVSRDTKLGPEEITADIPNVGEAALSKLDESGIVYIGAEVTGGDILVGKVTPKGETQLTPEEKLLRAIFGEKASDVKDSFLRVPNGVSGTVIDVQVFTRDGVEKDKRALEIEEMQLKQAKKDLSEELQILEAGLFSRIRAVLVSGGVEAEKLDKLPRDRWLELGLTDEEKQNQLEQLAEQYDELKHEFEKKLEAKRRKITQGDDLAPGVLKIVKVYLAVKRRIQPGDKMAGRHGNKGVISKINPIEDMPYDENGTPVDIVLNPLGVPSRMNIGQILETHLGMAAKGIGDKINAMLKQQQEVAKLREFIQRAYDLGADVRQKVDLSTFSDDEVLRLAENLRKGMPIATPVFDGAKEAEIKELLKLGDLPTSGQITLFDGRTGEQFERPVTVGYMYMLKLNHLVDDKMHARSTGSYSLVTQQPLGGKAQFGGQRFGEMEVWALEAYGAAYTLQEMLTVKSDDVNGRTKMYKNIVDGNHQMEPGMPESFNVLLKEIRSLGINIELEDE

SEQ ID NO: 75917 - protein, 328 aa, Salmonella typhi
MILMNALTAVKANTDDLAQRHTGFILAPSAQSPRLLALTFTADTTRQFLHQVAQWPVQALEYKSFLRFKIGKILDDLCGNQLQPLLIKTLLNRAQGALLISAEGIDDVAQAEEMVKLATAVAHLIGRSNYDAMSGQYYARFVVKNVDNSDSYLRQPHRVMELHNDGTYVEEVTDYVLMMKIDEQNMEGGNSLLLHLDDWEHLESFFTHPLARRVMRWAAPPSKNVSHDVWHPVFDVDQQGRPVMRYIDQFVQPKDFEEGVWLSELSDALETSQNILSVPVPVGKFLLINNLFWLHGRDRFTPHPDLRRELMRQRGYFAYAASHYQTHQ

SEQ ID NO: 75918 - protein, 121 aa, Salmonella typhi; identical to SEQ ID NO: 73617

SEQ ID NO: 75919 - protein, 165 aa, Salmonella typhi; identical to SEQ ID NO: 60065

SEQ ID NO: 75920 - protein, 482 aa, Salmonella typhi
MQLNDSTLFRQQAFIDGDWRDARGGDVIPVSNPANGKPLGNVPKMGAEETRDAINAANRALPAWRALTAKERANILRRWFNLMMEHQDDLARLMTLEQGKPLAEAKGEISYAASFIEWFAEEGKRIYGDTIPGHQTDKRLLVIKQPIGVTAAITPWNFPSAMITRKAGPALAAGCTMVLKPASQTPFSALALAELAQRAGILAGVFNVVTGSAGDIGGELTSNPLVRKLSFTGSTEIGRQLMEQCAKDIKKVSLELGGNAPFIVFDDADLDKAVEGALASKFRNAGQTCVCANRLYVQDGVYDRFAEKLNQAVNKLAVGDGLQADVAIGPLIDEKAVAKVQEHIADALEKGARVITGGEAHKLGGNFFQPTILADVPDNAKVAKEETFGPLAPLFRFSDEADVIRQANDTEFGLAAYFYARDLSRVFRVGEALEYGIVGINTGIISNEVAPFGGIKASGLGREGSKYGIEDYLEIKYMCIGL

SEQ ID NO: 75921 - protein, 234 aa, Salmonella typhi; identical to SEQ ID NO: 75086

SEQ ID NO: 75922 - protein, 383 aa, Salmonella typhi
MAEESDDDKTEAPTPHRLEKAREEGQIPRSRELTSLLILLVGVCIIWFGGESLARQLAGMLSAGLHFDHRMVNDPNLILGQIILLIKAAMMALLPLIAGVVLVALISPVMLGGLIFSGKSLQPKFSKLNPLPGIKRMFSAQTGAELLKAVLKSTLVGCVTGFYLWNHWPQMMRLMAESPIVAMGNALDLVGLCALLVVLGVIPMVGFDVFFQIFSHLKKLRMSRQDIRDEFKESEGDPHVKGKIRQMQRAAAQRRMMEDVPKADVIVTNPTHYSVALQYDENKMSAPKVVAKGAGLIALRIREIGAEHRVPTLEAPPLARALYRHAEIGQQIPGQLYAAVAEVLAWVWQLKRWRLAGGQRPPQPENLPVPEALDFMNEKNTDG

SEQ ID NO: 75923 - protein, 142 aa, Salmonella typhi; identical to SEQ ID NO: 42994

SEQ ID NO: 75924 - protein, 214 aa, Salmonella typhi
MMQPSIKPADEGSAGDIIARIGSLTRMLRDSLRELGLDQAIAEAAEAIPDARDRLDYVVQMTAQAAERALNSVEASQPHQDAMEKEAKALTQRWDEWFDNPIELSDARELVTDTRQFLRDVPGHTSFTNAQLLDIMMAQDFQDLTGQVIKRMMDVIQEIERQLLMVLLENIPEQSARPKRENESLLNGPQVDTSKAGVVASQEQVDDLLDSLGF

SEQ ID NO: 75925 - protein, 466 aa, Salmonella typhi
MGQLSESHALGGGLKSRHVTMLSIAGVIGASLFVGSSVAIAEAGPAVLLAYLFAGLLVVMIMRMLAEMAVATPDTGSFSTYADKAIGPWAGYTIGWLYWWFWVLVIPLEANIAAIILNSWIPGIPVWLFSLVITLALTGSNLLSVKNYGEFEFWLALSKVIAILAFIALGAAAISGFYPYAEVSGISRLWDHGGFMPNGFGAVLSAMLITMFSFMGAEIVTIAAAESDTPDKHIVRATNSVIWRISIFYLCSIFVVVALIPWNMPGLKSVGSYRSVLELLHIPHAKFIMDCVILLSVTSCLNSALYTASRMLYSLSRRGDAPAIMGKTNRSKTPWVAVLLSTGAAFLTVIVNYYAPAKVFKFLIDSSGAIALLVYLVIAISQLRMRKILLAQGGEIKLKMWLYPWLTWLVIGFICFVLVVMLFRPAQQLEVISTGLLGLGIIGTVPIMSRWKKLIRWQKAPLQNLR

SEQ ID NO: 75926 - protein, 181 aa, Salmonella typhi; identical to SEQ ID NO: 75082

SEQ ID NO: 75927 - protein, 394 aa, Salmonella typhi; identical to SEQ ID NO: 75081

SEQ ID NO: 75928 - protein, 129 aa, Salmonella typhi
MADKELKFLVVDDFSTMRRIVRNLLKELGFNNVEEAEDGVDALNKLQAGGFGFIISDWNMPNMDGLELLKTIRADSAMSALPVLMVTAEAKKENIIAAAQAGASGYVVKPFTAATLEEKLNKIFEKLGM

SEQ ID NO: 75929 - protein, 167 aa, Salmonella typhi
MTGMSNVSKLAGEPSGQEFLVFTLGNEEYGIDILKVQEIRGYDQVTRIANTPAFIKGVTNLRGVIVPIVDLRVKFCEGDVEYDDNTVVIVLNLGQRVVGIVVGGVSDVLSLTAEQIRPAPEFAVTLSTEYLTGLGALGERMLILVNIEKLLNSEEMALLDIAASHVA

SEQ ID NO: 75930 - protein, 342 aa, Salmonella typhi
MTHSLKPWNTFGIDHCAKHIVCAENEQQLLSAWQQATREGLPVMILGEGSNVLFLENYAGTVILNRLKGIEVNETADAWHLHVGAGENWHQLVRYALDNNMPGLENLALIPGCVGSSPIQNIGAYGVELHRVCDYVDCVELETGKRLRLSAAECRFGYRDSIFKNEYQDRVAIVAVGLRLSKQWQPVLTYGDLTRLDPKTVTAQQVFDAVCHMRTTKLPDPKVNGNAGSFFKNPVVAADIAMELLERFPNAPHYPQADGSVKLAAGWLIDQCQLKGVTIGGAAVHRQQALVLINANDATSKDVVALAHHVRQKVGEKFNVWLEPEVRFIGQFGEVNAVESIA

SEQ ID NO: 75931 - protein, 136 aa, Salmonella typhi
MSALVYFSSSSENTHRFMQRLGLPATRIPLNERERIQVDEPYILVVPSYGGGGMAGAVPRQVIRFLNDEHNRARIRGVIASGNRNFGDAWGCAGDVIAQKCGVPWLYRFELMGTQRDIDNVRKGVNEFWQQSPRSA

SEQ ID NO: 75932 - protein, 260 aa, Salmonella typhi
MLVFDSGVGGLSVYDEIRRLLPDLHYIYAFDNVAFPYGEKSETFIVERVVEIVTAVQQRYPLSLAVIACNTASTVSLPALREKFAFPVVGVVPAIKPAARLTANGVVGLLATRATVKRPYTHELIARFANECQIAMLGSAELVELAEAKLHGDSVSLEELRRILRPWLRMPEPPDTVVLGCTHFPLLRDELLQVLPEGTRLVDSGAAIARRTAWLLEHEAPDAKSTDANIAYCMAMTPGAEQLLPVLQRYGFETLEKLAV

SEQ ID NO: 75933 - protein, 714 aa, Salmonella typhi
MATITPERVMQETMDYHALNAMLNLYDKAGHIQFDKDQQAIDAFFAAHVRPHSVKFASQHERLETLVREGYYDDAVLARYDRAFVFRLFEHAHASGFRFQTFLGAWKFYTSYTLKTFDGKRYLEHFEDRVTMVALTLAQGDETLATQLTDEMLSGRFQPATPTFLNCGKQQRGELVSCFLLRIEDNMESIGRAVNSALQLSKRGGGVAFLLSNLREAGAPIKRIENQSSGVIPVMKMLEDAFSYANQLGARQGAGAVYLHAHHPDILRFLDTKRENADEKIRIKTLSLGVVIPDITFRLAKENAQMALFSPYDIQRRYGKPFGDIAISERYDELIADPHVRKTYINARDFFQTLAEIQFESGYLYIMFEDTVNRANPIAGRINMSNLCSEILQVNSASRYDDNLDYTHIGHDISCNLGSLNIAHVMDSPDIGRTVETAIRGLTAVSDMSHIRSVPSIAAGNAASHAIGLGQMNLHGYLAREGIAYGSPEALDFTNFYFYTITWHAVHTSMRLARERGKTFAGFAQSRYASGDYFTQYLQDDWQPKTAKVRALFARSGITLPTREMWLKLRDDVMRYGIYNQNLQAVPPTGSISYINHATSSIHPIVAKIEIRKEGKTGRVYYPAPFMTNENLDMYQDAYDIGPEKIIDTYAEATRHVDQGLSLTLFFPDTATTRDINKAQIYAWRKGIKSLYYIRLRQLALESTEIEGCVSCAL

SEQ ID NO: 75934 - protein, 319 aa, Salmonella typhi
MKLSRISAINWNKIQDDKDLEVWNRLTSNFWLPEKVPLSNDIPAWQTLSAAEQQLTIRVFTGLTLLDTIQNIAGAPSLMADAITPHEEAVLSNISFMEAVHARSYSSIFSTLCQTKEVDAAYAWSEENPPLQRKAQIILAHYVSDEPLKKKIASVFLESFLFYSGFWLPMYFSSRGKLTNTADLIRLIIRDEAVHGYYIGYKHQIALQKLSAIEREELKLFALDLLMELYDNEICYTEALYAETGWVNDVKAFLCYNANKALMNLGYEALFPPEMADVNPAILAALSPNADENHDFFSGSGSSYVMGKTVETEDEDWNF

SEQ ID NO: 75935 - protein, 167 aa, Salmonella typhi; identical to SEQ ID NO: 75132

SEQ ID NO: 75936 - protein, 466 aa, Salmonella typhi
MPHSWDYDAVVIGSGPGGEGAAMGLVKQGARVAVIERYHNVGGGCTHWGTIPSKALRHAVSRIIEFNQNPLYSDHSRLLRSSFADILNHADNVINQQTRMRQGFYERNHCEILQGNAHFIDEHTLALECHDGTVETLTAEKFVIACGSRPYHPNDVDFSHPRIYDSDSILSLHHEPRHVIIYGAGVIGCEYASIFRGMDVKVDLINTRDRLLAFLDQEMSDSLSYHFWNSGVVIRHNEEYEKIEGCDDGVIMHLKSGKKLKADCLLYANGRTGNTDSLALENIGLETDSRGQLKVNSMYQTALPHVYAVGDVIGYPSLASAAYDQGRIAAQALVKGEATAHLIEDIPTGIYTIPEISSVGKTEQQLTAMKVPYEVGRAQFKHLARAQIVGMNVGTLKILFHRETKEILGIHCFGERAAEIIHIGQAIMEQKGGGNTIEYFVNTTFNYPTMAEAYRVAALNGLNRLF

SEQ ID NO: 75937 - protein, 111 aa, Salmonella typhi
MKPLIFTLSLLALTGCTITRQAQVSEASPISGIVRLTYNQPLFFTSRTDDYVSHGTATRECQQMGYADAVSFGQPVGTCSIYAGSLCLNTRFTLSWQCRGVSVPQIMPLYY

SEQ ID NO: 75938 - protein, 176 aa, Salmonella typhi; identical to SEQ ID NO: 75230

SEQ ID NO: 75939 - protein, 458 aa, Salmonella typhi
MALWGGRFTQAADQRFKQFNDSLRFDYRLAEQDIVGSVAWSKALVTVGVLTADEQRQLEEALNVLLEEVRANPQQILQSDAEDIHSWVEGKLIDKVGQLGKKLHTGRSRNDQVATDLKLWCKETVMELLTANRQLQSALVETAQANQDAVMPGYTHLQRAQPVTFAHWCLAYVEMLARDESRLQDTLKRLDVSPLGCGALAGTAYEIDREQLAGWLGFTSATRNSLDSVSDRDHVLELLSDAAIGMVHLSRFAEDLIFFNSGEAGFVELSDRVTSGSSLMPQKKNPDALELIRGKCGRVQGALTGMMMTLKGLPLAYNKDMQEDKEGLFDALDIWLDCLHMAALVLDGIQVKRPRCQDAAQQGYANATELADYLVAKGVPFREAHHIVGEAVVEAIRQGKPLEALPLADLQKFSRVIGDDVYPILSLQSCLDKRAAKGGVSPQQVAQAIDDAKVRLAL

SEQ ID NO: 75940 - protein, 182 aa, Salmonella typhi
MQFNIPTLLTLFRVILIPFFVVVFYLPFAWAPMVSALIFCIAAITDWFDGFLARRWNQSTRFGAFLDPVADKVLVAIAMVLVTEHYHSWWVTLPAATMIAREIIISALREWMAELGKRSSVAVSWIGKVKTTAQMVALAWLLWRPNIWVEYAGIALFFVAAVLTLWSMLQYLSAARGDLLDQ

SEQ ID NO: 75941 - protein, 220 aa, Salmonella typhi
MELYLDTANVAEVERLARIFPIAGVTTNPSIVAASKESIWDVLPRLQNAIGEEGTLFAQTMSRDAKGMVEEAKRLNNAIPGIVVKIPVTAEGLAAIKLLKKEGIVTLGTAVYSASQGLLAALAGAKYVAPYVNRVDAQGGDGIRMVLELQTLLEHHAPDSMVLAASFKTPRQALDCLLAGCQAITLPLDVAQQMLNTPAVESAIEKFEQDWKNAFGNLNL

SEQ ID NO: 75942 - protein, 240 aa, Salmonella typhi
MQENDFFTWRRAMLLRFQEMAAAEDVYTELQYQTQRLEFDYYALCVRHPVPFTRPKISLRTTYPQAWVTHYQSENYFAIDPVLKPENFRQGHLHWDDVLFHEAQAMWDAAQRFGLRRGVTQCVMLPNRALGFLSFSRSSLRCSSFTYDEVELRLQLLARESLSALTRLEDDMVMAPEMRFSKREKEILKWTAEGKTSSEIAIILSISENTVNFHQKNMQKKFNAPNKTQIACYAAATGLI

SEQ ID NO: 75943 - protein, 61 aa, Salmonella typhi; identical to SEQ ID NO: 42597

SEQ ID NO: 75944 - protein, 250 aa, Salmonella typhi
MSAIEVTNLVKKFHGQTVLHGIDLEVKPGEVVAIIGPSGSGKTTLLRCINLLEQPEAGTIKVGDIIIDTARPFSQQKGLIRQLRQHVGFVFQSFNLFPHRTVLENIIEGPVIVKGEPKAEATALARELLAKVGLAGKETRYPRRLSGGQQQRVAIARALAMRPEVILFDEPTSALDPELVGEVLNTIRQLAQEKRTMVIVTHEMGFARDVADRAIFMDQGQIVEQGPAKTLFADPQHPRTRQFLEKFLVK

SEQ ID NO: 75945 - protein, 876 aa, Salmonella typhi
MSKSTAEIRQAFLDFFHSKGHQVVASSSLVPNNDPTLLFTNAGMNQFKDVFLGLDKRNYSRATTSQRCVRAGGKHNDLENVGYTARHHTFFEMLGNFSFGDYFKHDAIQFAWELLTGENWFALPKERLWVTVYETDDEAYEIWEKEVGIPRERIIRIGDNKGAPYASDNFWQMGDTGPCGPCTEIFYDHGDHIWGGPPGSPEEDGDRYIEIWNIVFMQFNRQADGTMEPLPKPSVDTGMGLERIAAVLQHVNSNYDIDLFRTLIEAVAKVTGSTDLGNKSLRVIADHIRSCAFLVADGVLPSNENRGYVLRRIIRRAVRHGNMLGAKETFFYKLVGPLIEVMGSAGEELKRQQAQVEQVLKTEEEQFARTLERGLALLDEELAKLQGDTLDGETAFRLYDTYGFPVDLTADVCRERNIKVDEAGFEAAMEEQRRRAREASGFGADYNAMIRVDSASEFKGYDHLELNGKVTALFVDGKAVEAINAGQEAVVVLDQTPFYAESGGQVGDKGELKGAGFTFAVDDTQKYGQAIGHLGKLSAGALKVGDAVQADVDEARRARIRLNHSATHLMHAALRQVLGTHVAQKGSLVSDKVLRFDFSHNEAMKPSEIREVEDLVNAQIRRNLPIETNIMDLDAAKAKGAMALFGEKYDERVRVLSMGDFSTELCGGTHASRTGDIGLFRIISESGTAAGIRRIEAVTGEGAMATVHAQSDRLNDIAHLLKGDSQNLGDKVRAVLERTRQLEKELQQLKDQAAAQESANLSSKAVDLNGVKLLVSELAGIEPKMLRTMVDDLKNQLGSTVIVLATVVEGKVSLIAGVSKDVTDRVKAGELIGMVAQQVGGKGGGRPDMAQAGGTDAAALPAALASVQGWVSAKLQ

SEQ ID NO: 75946 - protein, 166 aa, Salmonella typhi
MSEPTSRRPAYARLLDRAVRILAVRDHSEQELRRKLSAPVMGKNGPEEIDATADDYERVIAWCHEHHYLDDERFVMRFIASRSRKGYGPARIRQELNQKGISRESTEKAMRECEIDWSEMAREQAVRKYGEPLPSNFSEKVKVQRFLLYRGYLMDDIQQIWRNFAD

SEQ ID NO: 75947 - protein, 726 aa, Salmonella typhi
MSTTDDTHNTLSTGKCPFHQGGHDRSAGAGTASRDWWPNQLRVDLLNQHSNRSNPLGEDFDYRKEFSKLDYSALKGDLKALLTDSQPWWPADWGSYVGLFIRMAWHGAGTYRSIDGRGGAGRGQQRFAPLNSWPDNVSLDKARRLLWPIKQKYGQKISWADLFILAGNVALENSGFRTFGFGAGREDVWEPDLDVNWGDEKAWLTHRHPEALAKAPLGATEMGLIYVNPEGPDHSGEPLSAAAAIRATFGNMGMNDEETVALIAGGHTLGKTHGAAAASHVGADPEAAPIEAQGLGWASSYGSGVGADAITSGLEVVWTQTPTQWSNYFFENLFKYEWVQTRSPAGAIQFEAVDAPDIIPDPFDPSKKRKPTMLVTDLTLRFDPEFEKISRRFLNDPQAFNEAFARAWFKLTHRDMGPKARYIGPEVPKEDLIWQDPLPQPLYQPTQEDIINLKAAIAASGLSISEMVSVAWASASTFRGGDKRGGANGARLALAPQRDWEVNAVAARVLPVLEALQKTTNKASLADIIVLAGVVGIEQAAAAAGVSISVPFAPGRVDARQDQTDIEMFSLLEPIADGFRNYRARLDVSTTESLLIDKAQQLTLTAPEMTVLVGGMRVLGTNFDGSQNGVFTDRPGVLSTDFFANLLDMRYEWKPTDDANELFEGRDRLTGEVKYTATRADLVFGSNSVLRALAEVYACSDAHEKFVKDFVAAWVKVMNLDRFDLL

SEQ ID NO: 75948 - protein, 353 aa, Salmonella typhi
MAIDENKQKALAAALGQIEKQFGKGSIMRLGEDRSMDVETISTGSLSLDIALGAGGLPMGRIVEIYGPESSGKTTLTLQVIAAAQREGKTCAFIDAEHALDPVYARKLGVDIDNLLCSQPDTGEQALEICDALARSGAVDVIVVDSVAALTPKAEIEGEIGDSHMGLAARMMSQAMRKLAGNLKQSNTLLIFINQIRMKIGVMFGNPETTTGGNALKFYASVRLDIRRIGAVKEGDNVVGSETRVKVVKNKIAAPFKQAEFQILYGEGINFYGELVDLGVKEKLIEKAGAWYSYNGEKIGQGKANATTWLKENPATAKEIEKRVRELLLSNQNATPDFAVDDSEGVAETNEDF

SEQ ID NO: 75949 - protein, 359 aa, Salmonella typhi
MFKRRYVALLPLCVLLAACSSTPKSSETQATTGTPSGGFLLEPQHNVMQMGGDFANNPNAQQFIDKMVSKHGFDRQQLQEILSQSKRLDYVLRLMDRQAPTTQPPAGPNGAWLRYRKQFITPDNVQNGVAFWNQYEDALNRAWQVYGVPPEIIVGIIGVETRWGRIMGKTRILDALATLSFNYPRRAEYFSGELETFLLMARDEQDDPLNLKGSFAGAMGYGQFMPSSYKEYAVDFNGDGHINLWDPVDAIGSVANYFKAHGWVKGDMVAVPASGQAPGLANGFKTKYSISQLAAAGLTPQQSLGNHQEASLLRLDIGTGYQYWYGLPNFYTITRYNHSTHYAMAVWQLGQAVALARVR

SEQ ID NO: 75950 - protein, 259 aa, Salmonella typhi
MNQVAVVIGGGQTLGAFLCRGLAEEGYRVAVVDIQSDKAANVAQEINADFGEGMAYGFGADATSEQSVLALSRGVDEIFGRVDLLVYSAGIAKAAFISDFQLGDFDRSLQVNLVGYFLCAREFSRLMIRDGIQGRIIQINSKSGKVGSKHNSGYSAAKFGGVGLTQSLALDLAEYGITVHSLMLGNLLKSPMFQSLLPQYATKLCIKPDEVEQYYIDKVPLKRGCDYQDVLNMLLFYASPKASYCTGQSINVTGGQVMF

SEQ ID NO: 75951 - protein, 119 aa, Salmonella typhi; identical to SEQ ID NO: 75283

SEQ ID NO: 75952 - protein, 331 aa, Salmonella typhi; identical to SEQ ID NO: 75136

SEQ ID NO: 75953 - protein, 290 aa, Salmonella typhi; identical to SEQ ID NO: 73058

SEQ ID NO: 75954 - protein, 373 aa, Salmonella typhi
MRFVDEYRAPEQVMQLIEHLRERAALLPYTAERPLRIMEVCGGHTHAIFKFGLDQLLPENVEFIHGPGCPVCVLPMGRIDSCVEIASHPEVIFCTFGDAMRVPGKQGSLLQAKARGADVRIVYSPMDALKLAQDNPTRKVVFFGLGFETTMPTTAITLQQAKQRDVRNFYFFCQHITLIPTLRSLLEQPDNGIDAFLAPGHVSMVIGTEAYQFIAADFHRPLVVAGFEPLDLLQGVVMLVEQKIAALSQVENQYRRVVPDAGNMLAQQAIADVFCVNGDSEWRGLGVIESSGVHLTPEYQRFDAEAHFRPAPQQVYDDPRARCGEVLTGRCKPHQCPLFGKTCNPETAFGALMVSSEGACAAWYQYRQQECEV

SEQ ID NO: 75955 - protein, 692 aa, Salmonella typhi
MSYTPMSDLGQQGLFDITRTLLQQPDLASLSEALSQLVKRSALADSAGIVLWQAQSQRAQYYATRENGRPVEYEDETVLAHGPVRRILSRPDALHCNFHEFTETWPQLAASGLYPEFGHYCLLPLAAEGRIFGGCEFIRQEDRPWSEKEYDRLHTFTQIVGVVAEQIQNRVNNNVDYDLLCRERDNFRILVAITNAVLSRLDINELVSEVAKEIHHYFNIDAISIVLRSHRKNKLNIYSTHYLDEHHPAHEQSEVDEAGTLTERVFKSKEMLLINLNERDPLAPYERMLFDTWGNQIQTLCLLPLMSGKTMLGVLKLAQCEEKVFTTANLKLLRQIAERVAIAVDNALAYQEIHRLKERLVDENLALTEQLNNVDSEFGEIIGRSEAMYNVLKQVEMVAQSDSTVLILGETGTSKELIARAIHNLSGRSGRRMVKMNCAAMPAGLLESDLFGHERGAFTGASAQRIGRFELADKSSLFLDEVGDMPLELQPKLLRVLQEQEFERLGSNKLIQTDVRLIAATNRDLKKMVADREFHNDLYYRLNVFPIQLPPLRERPEDIPLLVKAFTFKIARRMGRNIDSIPAETLRTLSGMEWPGNVRELENVVERAVLLTRGNVLQLSLPDMTAVTPDTSPVATESAKEGEDEYQLIIRVLKETNGVVAGPKGAAQRLGLKRTPLLSRMKRLGIDKDALA

SEQ ID NO: 75956 - protein, 207 aa, Salmonella typhi
MSTIIMDLCSYTRLGLSGYLVSRGVKKREINDIETVDELAIACGAHQPSVVFINEDCFIHTPSDSQQIKQIINQHPDTLFIVFMAIANVHFDEYLLVRKNLLISSKSIKPDSLDTLLGDILKKESGISGTINLPTLSLSRTESSMLRMWMEGQGTIQISDRMNIKAKTVSSHKGNIKRKIKTHNKQVIYHVVRLTDNVTNGIFANMR

SEQ ID NO: 75957 - protein, 265 aa, Salmonella typhi
MIKWPWKAQEITQNEDWPWDDALAIPLLVNLTAQEQARLIALAERFLQQKRLVALQGFELDSLKSARIALIFCLPILELGIEWLDGFHEVLIYPAPFVVDDEWEDDIGLVHSQRVVQSGQSWQQGPIILNWLDTQDSFDASGFNLIIHEVAHKLDMRNGDRASGIPFIPLRDVAGWEHDLHAAMNNIQDEIDLVGESAASIDAYAATDPAECFAVLSEYFFSAPELFAPRFPALWQRFCQFYRQDPSQRLRVSAAEGDYGEESEH

SEQ ID NO: 75958 - protein, 484 aa, Salmonella typhi
MENKGTNLTPEQALDRLEELYEQSVNALREAIADYVDNGTLPDPHARLNGLFVYPSLSVSWDGATPNPPKTRAFGRFTHPGCYTTTVTRPALFRAYLLEQLNLVYHDYGAHIAIEASHHEIPYPYVIDGSALTLDRSMSAGLTRHFPTTELAQIGDETADGLFHPGEFYPLSHFDARRVDFSLARLRHYTGTPVEHFQPFVLFTNYTRYVDEFVRWGCSQILDPDSPYIALSCAGGIWITAETEAPEEAISDLAWKKHQMPAWHLVTADGQGITLVNIGVGPSNAKTICDHLAVLRPDVWLMIGHCGGLRESQAIGDYVLAHAYLRDDHVLDAVLPPDIPIPSIAEVQRALYDATKAVSGMPGEEVKQRLRTGTVVTTDDRNWELRYSASALRFNLSRAVAIDMESATIAAQGYRFRVPYGTLLCVSDKPLHGEIKLPGQANRFYEGAISEHLQIGIRAIDLLRAEGDRLHSRKLRTFNEPPFR

SEQ ID NO: 75959 - protein, 506 aa, Salmonella typhi
MTQAVMLQGTASDVGKSVLVAGLCRIFYQDGLRTAPFKSQNMALNSGITPDGKEMGRAQIFQAEAAGITPDVRMNPVLLKPTSDRQAQVVLMGKVATNMDAVSYHDYKPRLREQILAVYNSLAQEYDVIVLEGAGSPAEINLRDRDIVNMGMAEMAQCPVILVADIDRGGVFAAIYGTLALLHKQERDRVKGVIINKFRGDVALLYSGIEQIESLTGVPVLGVMPWLDVDLEDEDGVALQNDKYRGNAPRDITIAIVQLPHISNFTDFNALAAQPDVRIRYIRRPEALTDADLVILPGSKNTLSDLAWLRESGMADAVLQTHRQGVPVMGICGGYQMLGDTIVDEVESGLGTQPGLGLLNTITRFAQDKTTTQVNATMSGELPGWLAAAAGLPVRGYEIHMGETVLQEGCCTAMTLQKNGCSVADGAVTADGLAFGTYLHGLFDSDAFTRAVVNGLRARKGLAPWETTFCYAEHKARQFDLLAEAMRQHIDIDKIYTIMQQHQEPV

SEQ ID NO: 75960 - protein, 572 aa, Salmonella typhi
MKQTVAAFIAKTLEQAGVKQIWGVTGDSLNGLSDSLNRMGTIEWMPTRHEEVAAFAAGAQAQLTGELAVCAGSCGPGNLHLINGLFDCHRNHVPVLAIAAHIPSSEIGSGYFQETHPQELFRECSHYCELVSSPEQIPQVLAIAMRKAVLNRGVSVVVLPGDVALKPAPENAVTHWYHAPHPVVTPAEEELKKLAQLLRYSSNIALMCGSGCAGAHEELVALAAKLKAPIVHALRGKEHVEYDNPYDVGMTGLIGFSSGFHTMMNADTLILLGTQFPYRAFYPSDAKIIQIDINPGSIGAHSKVDMALVGDIKATLRALLPLVEEKSNRKFLDKALEHYRDARKGLDDLAKLSDKAIHPQYLAQQISHFAADDAIFTCDVGTPTVWAARYLKMNGKRRLLGSFNHGSMANAMPQALGAQATAPGRQVIAMCGDGGFSMLMGDFLSVVQMKLPIKIVVFNNSVLGFVAMEMKAGGYLTDGTELHDTNFARIAEACGITGIRVEKAADVDGALQRAFSIDGPVLVDVVVAKEELAIPPQIKLEQAKGFSLYMLRAIISGRGDEVIELAKTNWLR

SEQ ID NO: 75961 - protein, 323 aa, Salmonella typhi
MMTMPTSQCPWRMQVHHIRQETPDVWTIALLCHDYYPYRAGQYALVSVRNSAETLRAYTLSSTPGVSEYITLTVRRIEDGTGSQWLTHDIKRGDYIWLSDAMGDFTCDDKTEDKFLLLAAGCGVTPIMSMRRWLAKYRPQADVQVIFNVRSPDDVIFADEWRQYPVTLVAENHATEGFIAGRLTTELLQRVPDLASRTIMTCGPAPYMDFVEQGVKALGVTHFFKEKFFTPVAETATSGLKFTKLQPAQEFYAPIGTTLLEALESNKVPVAAACRAGVCGCCKTKVVSGDYTVSSTMTLSEAEIAEGYVLACSCHPQGDLVLA

SEQ ID NO: 75962 - protein, 299 aa, Salmonella typhi
MFSGLLIILVPLIVGYLIPLRHKAALQLINRLLSWIVYLILFFMGISLAFLDNLASNLVAIFHYSAVSITIILLCNIAALLWLERILPWRHHHQQEKLPSRIAMALESLQLCGVVVLGFIIGLSGLSVLQHATEASEYTLIFLLFLVGIQLRNSGMTLKQIVLNRRGMMVAVVVVASSLLGGVINAFILDLPLKTAMAMASGFGWYSLSGILLTESFGPVIGSAAFFNDLARELLAIMLIPGLVRRSRSTALGLCGATSMDFTLPVLQRSGGVEIVPAAIVHGFILSLLVPLLMAFFSA

SEQ ID NO: 75963 - protein, 552 aa, Salmonella typhi
MILERVEIVGFRGINRLSLMLEQNNVLIGENAWGKSSLLDALTLLLSPELDLYHFVREDFWFPPGDIKGREHHLHIILTFRETQPGRHRVRRYRALEACWSPCEDDFHRIFYRLEGECGADGSVMTLRSFLNSDGQPLPVENINDQVRHLVRLMPVLRLRDARFMRRIRNGTVPNVPDVEVTARQLDFLARELATRPQNLTDGQIRQGLSAMVQLLEHYFSEQGAGQARHRLMRRRSQNEQRSWRYLDIINRMIDKPGSRSHRVILLGLFSTLLQAKGTLRLHKDARPLLLVEDPETRLHPIMLSVAWQLLNLLPLQRIATTNSGELLSLTPVEHVVRLVRESSRVAAWRLGTGGLSAEDGRRIAFHIRFNRASSLFARCWLLVEGETETWVINELARQCGHHFDAEGIKVIEFAQSGLKPLVKFARRMGIEWHVLVDGDEAGKKYAATVRSLLNNDREEEREHLTALPTLDMEHFMYRQGFADVFHRVAQLPLNVPMNTRKIITKAIHRSSKPDLAIEVAMEAGRRGIDAVPPLFRKMFSRVVWLARGRAD

SEQ ID NO: 75964 - protein, 72 aa, Salmonella typhi; identical to SEQ ID NO: 56498

SEQ ID NO: 75965 - protein, 1343 aa, Salmonella typhi
MSQEYTEDKDVTLTKLSSGRRLLEALLILIALFAVWLMAALLSFNPSDPSWSQTAWHEPIHNLGGAPGAWLADTLFFIFGVMAYTIPVIIVGGCWFAWRHQSTDDYIDYFAVSLRLIGVLALILTSCGLAAINADDIWYFASGGVIGSLLSTTLQPLLHSSGGTIMLLCIWAAGLTLFTGWSWVSIAEKLGGWLLNILTFASNRTRRDDTWVDDEEYDDEYDEETDGVQRESRRARILRGALARRKRLAEKFSNPRGRQTDAALFSGKRMDDDEDIQYSARGVAADPDDVLFSGNRATQSEYDEYDPLLNGHSVTEPVAAAAAATAVTQTWAASADPIMQTPPMPGAEPVVAQPTVEWQPVPGPQTGEPVIAPAPEGYQPHPQYAQPQEAQSAPWQQPVPVASAPQYAATPATAAEYDSLAPQETQPQWQAPDAEQHWQPEPIAAEPSHMPPPVIEQPVATEPEPGIEETRPARPPLYYFEEVEEKRAREREQLAAWYQPIPEPVKENVPVKPTVSVAPSIPPVEAVAAAASLDTGIKSGALAAGAAAAAPAFSLATGGAPRPQVKEGIGPQLPRPNRVRVPTRRELASYGIKLPSQRIAEEKAREAERNQYETGAQLTDEEIDAMHQDELARQFAQSQQHRYGETYQHDTQQAEDDDTAAEAELARQFAASQQQRYSGEQPAGAQPFSLDDLDFSPMKVLVDEGPHEPLFTPGVMPESTPVQQPVAPQPQYQQPVAPQPQYQQPQQPVASQPQYQQPQQPVAPQPQYQQPQQPVAPQPQYQQPQQPVAPQPQYQQPQQPVAPQPQYQQPQQPVAPQPQYQQPQQPTAPQDSLIHPLLMRNGDSRPLQRPTTPLPSLDLLTPPPSEVEPVDTFALEQMARLVEARLADFRIKADVVNYSPGPVITRFELNLAPGVKAARISNLSRDLARSLSTVAVRVVEVIPGKPYVGLELPNKKRQTVYLREVLDNAKFRENPSPLTVVLGKDIAGDPVVADLAKMPHLLVAGTTGSGKSVGVNAMILSMLYKAQPEDVRFIMIDPKMLELSVYEGIPHLLTEVVTDMKDAANALRWSVNEMERRYKLMSALGVRNLAGYNEKIAEAARMGRPIPDPYWKPGDSMDVQHPVLEKLPYIVVLVDEFADLMMTVGKKVEELIARLAQKARAAGIHLVLATQRPSVDVITGLIKANIPTRIAFTVSSKIDSRTILDQGGAESLLGMGDMLYSGPNSTMPVRVHGAFVRDQEVHAVVQDWKARGRPQYVDGITSDSESEGGGGGFDGGEELDALFDQAVNFVTQKRKASISGVQRQFRIGYNRAARIIEQMEAQGIVSAQGHNGNREVLAPPPFE

SEQ ID NO: 75966 - protein, 447 aa, Salmonella typhi
MSNLSLDFSDNTFQPLAARMRPENLAQYIGQQHLLAAGKPLPRAIEAGHLHSMILWGPPGTGKTTLAEVIARYASADVERISAVTSGVKEIREAIERARQNRNAGRRTILFVDEVHRFNKSQQDAFLPHIEDGTITFIGATTENPSFELNSALLSRARVYLLKSLTTDDIEQVLDQAMQDKTRGYGDQDIVLPDETRRAIAELVNGDARRALNTLEMMADMAEADDSGKRVLLPALLTEIAGERSARFDNKGDRFYDLISALHKSVRGSAPDAALYWYARIITAGGDPLYVARRCLAIASEDVGNADPRAMQVAIAAWDCFTRVGPAEGERAIAQAIVYLACAPKSNAVYTAFKAALADARERPDYDVPVHLRNAPTKLMKEMGYGQEYRYAHDEPNAYAAGEVYFPPEIAQTRYYHPTNRGLEGKIGEKLAWLAEQDQNSPTKRYR

SEQ ID NO: 75967 - protein, 430 aa, Salmonella typhi; identical to SEQ ID NO: 75150

SEQ ID NO: 75968 - protein, 814 aa, Salmonella typhi
MKTKIPDAVLAAEVSRRGLVKTTAIGGLAMASSAFTLPFTRIANAAEAISPTKTDEKVVWSACTVNCGSRCPLRMHVVDGEIKYVETDNTGNDDYDGLHQVRACLRGRSMRRRVYNPDRLKYPMKRVGARGEGKFERISWDEAYDIIATNMQRLIKEYGNESIYLNYGTGTLGGTLTRSWPPGKTLVARLMNCCGGYLNHYGDYSSAQIAAGLNYTYGGWADGNSPSDIENSKLVVLFGNNPGETRMSGGGGTYYLEQARQKSNARMIIIDPRYTDTGAGREDEWIPIRPGTDAALVNGLAYVLITENMVDQPFLDKYCVGYDEKTLPASAPKNGHYKAYILGLGKDGIAKTPEWAAQITGIPADRIIKLAREIGSAKPAYICQGWGPQRHANGEIATRAISMLAILTGNVGINGGNSGAREGSYALPFERMPTLENPVETSISMFMWTDAIERGPEMTALRDGVRGKDKLDVPIKMIWNYAGNCLINQHSEINRTHEILQDDSKCEMIVVIDCHMTSSAKYADILLPDCTASEQMDFALDASCGNMSYVIFTDQAIKPRFECKTIYEMTSELAKRLGVEQQFTEGRTQEEWMRHLYEQSRKSIPNLPTFEEFRKQGIFKQRDPEGHHVAYKDFREDPQANPLTTPSGKIEIYSQALADIAATWELPEGDVIDPLPIYTLGFENYNDPLTDKFPLQLTGFHYKARVHSTYGNVDVLKAACRQEMWINPMDAQKRGINNGDKVRIFNDRGEVHIEAKVTPRMMPGVVALGEGAWYDPDAKRVDQGGCINVLTSQRPSPLAKGNPSHTNLVQVEKA

SEQ ID NO: 75969 - protein, 285 aa, Salmonella typhi
MKADNPFDLLLPAAMAKVAEEAGVYKATKHPLKTFYLAITAGVFISIAFVFYITATTGTGAMPYGMAKLIGGICFSLGLILCVICGADLFTSTVLIVVAKASGRITWGQLAKNWLNVYFGNLIGALLFVLLMWLSGEYMTANGQWGLNVLQTADHKMHHTFIEAVCLGILANLMVCLAVWMSYSGRSLMDKAFIMVLPVAMFVASGFEHSIANMFMIPMGIVIRDFATPEFWTAVGSSPESFSHLTVMSFITDNLIPVTIGNIIGGGLLVGLTYWVIYLRGNEHH

SEQ ID NO: 75970 - protein, 227 aa, Salmonella typhi
MTAIAPVITIDGPSGAGKGTLCKAMAEALQWHLLDSGAIYRVLALAALHHHVDLASEDALVPLASHLDVRFVSTDGNLEVILEGEDVSGEIRTQEVANAASQVAAFPRVREALLRRQRAFREAPGLIADGRDMGTVVFPDAPVKIFLDASSEERAHRRMLQLQENGFSVNFERLLAEIKERDDRDRNRAVAPLVPAADALVLDSTRLSIEQVIEKALQYARQKLALA

SEQ ID NO: 75971 - protein, 557 aa, Salmonella typhi; identical to SEQ ID NO: 75236

SEQ ID NO: 75972 - protein, 582 aa, Salmonella typhi; identical to SEQ ID NO: 75237

SEQ ID NO: 75973 - protein, 466 aa, Salmonella typhi
MSVVPVADVLQGRVAVDQEVTVRGWVRTRRDSKAGISFLAVYDGSCFDPVQAVINNSLPNYNEEVLHLTTGCSVVVTGKVVASPGQGQSFEIQATKVEVAGWVEDPDTYPMAAKRHSIEYLREVAHLRPRTNLIGAVARVRHTLAQALHRFFDEQGFFWVSTPLITASDTEGAGEMFRVSTLDLENLPRNDQGRVDFDKDFFGKESFLTVSGQLNGETYACALSKIYTFGPTFRAENSNTSRHLAEFWMLEPEVAFADLEDNARLAEAMLKYVFKAVLEERADDMKFFAERVDKDAIARLERFVSTDFAQVDYTDAVAILERCGKTFENPVFWGVDLSSEHERYLAEEHFKAPVVVKNYPKEIKAFYMRLNEDGKTVAAMDVLAPGIGEIIGGSQREERLDVLDARMAEMGLNKEDYWWYRDLRRYGTVPHSGFGLGFERLIAYVTGVQNVRDVIPFPRTPRNASF

SEQ ID NO: 75974 - protein, 416 aa, Salmonella typhi
MESKVVVPVEGKKITLQNGKLNVPENPIIPFIEGDGIGVDVTPAMLKVVDAAVEKAYKGERKISWMEIYTGEKSTQVYGQDVWLPAETLDLIRDYRVAIKGPLTTPVGGGIRSLNVALRQELDLYVCLRPVRYYQGTPSPVKHPELTDMVIFRENSEDIYAGIEWKADSADAEKVIKFLREEMGVKKIRFPEHCGIGIKPCSEEGTKRLVRAAIEYAITNDRDSVTLVHKGNIMKFTEGAFKDWGYQLARDEFGGELIDGGPWLKIKNPNTGKEIVVKDVIADAFLQQILLRPAEYDVIACMNLNGDYISDALAAQVGGIGIAPGANIGDECALFEATHGTAPKYAGQDKVNPGSIILSAEMMLRHMQWFEAADLIVKGMEGAIAAKTVTYDFERLMDGAKLLKCSEFGDAIIANM

SEQ ID NO: 75975 - protein, 400 aa, Salmonella typhi
MTQFASPVLHSLLDTDAYKLHMQQAVFHHYYDVQVAAEFRCRGDDLLGIYADAIREQVDAMQHLRLQEDEFQWLSGLPFFKPDYLNWLREFRYNPAQVCVTNDNGKLNIRLTGSWREVIMWEVPLLAVISELVHHYRSPNAGVDQALDALESKLVDFTALTANLDMSRFHLMDFGTRRRFSREVQQAIVKRLQQESWFVGTSNYDLARRLALTPMGTQAHEWFQAHQQINPDLATSQRAALAAWLNEYPDQLGIALTDCITMDAFLRDFGIEFASRYQGLRHDSGDPVAWGEKAIAHYEKLGIDPLTKTLVFSDNLDLPKAVELYRHFASRVQLSFGIGTRLTCDIPQVKPLNIVIKLVECNGKPVAKLSDSPGKTICHDKAFVRALRKAFDLPQVRKAS

SEQ ID NO: 75976 - protein, 465 aa, Salmonella typhi
MSHSSAPERATGAVITEWRPEDPAFWQQRGHRVASRNLWISVPCLLLAFCVWMLFSAVAVNLPKVGFNFTTDQLFMLTALPSVSGALLRVPYSFMVPLFGGRRWTAFSTGILIVPCVWLGFAVQDTSTPFSTFIIISLLCGFAGANFASSMANISFFFPKQKQGGALGLNGGLGNMGVSVMQLVAPLVVSLSIFAAFGSHGVEQPDGSQLYLANAAWIWVPFLAIFTLAAWFGMNELATSKASLKEQLPVLKRGHLWIMSLLYLATFGSFIGFSAGFAMLSKTQFPDVQILHYAFFGPFIGALARSAGGAISDRLGGTRVTLINFVLMAIFSGLLFLTLPTGGVGGSFIAFYGVFLALFLTAGLGSGSTFQMISVIFRKLTMDRVKAEGGSDERAMREAATDTAAALGFISAIGAIGGFFIPKAFGSSLALTGSPVGAMKVFLIFYIACVVITWAVYGRHSKNKK

SEQ ID NO: 75977 - protein, 1247 aa, Salmonella typhi
MSKFLDRFRYFKQKGETFADGHGQLLETNRDWEDGYRQRWQHDKIVRSTHGVNCTGSCSWKIYVKNGLVTWETQQTDYPRTRPDMPNHEPRGCPRGASYSWYLYSANRLKYPLMRKRLMKMWREAKKLHRDPVEAWASIIEDADKAKSFKQARGRGGFVRSSWQEVNELIAASNVYTVKTYGPDRVAGFSPIPAMSMVSYASGARYLSLIGGTCLSFYDWYCDLPPASPQTWGEQTDVPESADWYNSSYIIAWGSNVPQTRTPDAHFFTEVRYKGTKTVAVTPDYAEIAKLCDLWLAPKQGTDAAMALAMGHVMLREFHLDNPRQYFTDYVRRYTDMPMLVMLEERDGYYAAGRMLRAADLVDSLGQENNPEWKTVAINSNGEMVAPNGSIGFRWGEKGKWNLEQRDGTTGAETELQLSLLGSQDEIADVGFPYFGGEGSEYFNHVALDNVLLHKLPAKRLQLADGSSALVTTVYDLTMANYGLERGLNDENCAASYDDTKAYTPAWAEQITGVPRAQIIRIAREFADNADKTHGRSMIIVGAGLNHWYHLDMNYRGLINMLVFCGCVGQSGGGWAHYVGQEKLRPQTGWQPLAFALDWQRPARHMNSTSYFYNHSSQWRYETVTAEELLSPMADKSRYSGHLIDFNVRAERMGWLPSAPQLGTNPLYIAREAEKAGMTPVDYTVKSLKDGSIRFAAEQPENGKNHPRNLFIWRSNLLGSSGKGHEYMLKYLLGTEHGIQGLDLGKQGGVKPEEVEWRDNGLDGKLDLVVTLDFRLSSTCLYSDIVLPTATWYEKDDMNTSDMHPFIHPLSAAVDPAWESKSDWEIYKGIAKKFSEVCVGHLGKETDVVTLPIQHDSAAELAQPLDVKDWKKGECDLIPGKTAPHIMTVERDYPATYERFTSIGPLMEKIGNGGKGIAWNTQSEMDLLRKLNYTKADGPAKGQPMLNTAIDAAEMILTLAPETNGQVAVKAWAALSEFTGRDHTHLATNKEEEKIRFRDIQAQPRKIISSPTWSGLEDEHVSYNAGYTNVHELIPWRTLSGRQQLYQDHQWMRDFGESLLVYRPPIDTRSVKAVMGRKSNGNPEKALNFLTPHQKWGIHSTYSDNLLMLTLSRGGPIVWMSETDAKELGIEDNDWIEVFNSNGALTARAVVSQRVPAGMTMMYHAQERIVNLPGSEITQQRGGIHNSVTRITPKPTHMIGGYAQLAYGFNYYGTVGSNRDEFVVVRKMKNINWLDGEGNDQVQESVK

SEQ ID NO: 75978 - protein, 280 aa, Salmonella typhi
MQSLQRKVLRTICPDQKGLIARITNICYKHELNIVQNNEFVDHRTGRFFMRTELEGIFNDSTLLADLDSALPEGSVRELNPAGRRRVVILVTKEAHCLGDLLMKANYGGLDVEIAAVIGNHETLRSLVERFEIPFELVSHEGLTREEHDTKMADAIDTHQPDYVVLAKYMRVLTPGFVARFPNKIINIHHSFLPAFIGARPYHQAYERGVKIIGATAHYVNDNLDEGPIIMQDVIHVDHTYTAEDMMRAGRDVEKNVLSRALYQVLAQRVFVYGNRTIIL

SEQ ID NO: 75979 - protein, 302 aa, Salmonella typhi
MAALNSKVKKAVIPVAGLGTRMLPATKAIPKEMLPLVDKPLIQYVVNECIAAGITEIVLVTHSSKNSIENHFDTSFELEAMLEKRVKRQLLEEVQSICPPHVTIMQVRQGLAKGLGHAVLCAHPVVGNEPVAVILPDVILDEYESDLSQDNLAEMIRRFDETGNSQIMVEPVEDVTAYGVVDCKGVELAPGESVPMVGVVEKPKADVAPSNLAIVGRYVLSADIWALLAKTPPGAGDEIQLTDAIDMLIEKETVEAYHMKGKSHDCGNKLGYMQAFVEYGIRHNSLGAEFKAWLEEEMGIKK

SEQ ID NO: 75980 - protein, 205 aa, Salmonella typhi
MAQLYFYYSAMNAGKSTALLQSSYNYQERGMRTVVYTAEIDDRFGAGKVSSRIGLSSPAKLFNQNTSLFEEIRAESARQTIHCVLVDESQFLTRQQVYQLSEVVDKLDIPVLCYGLRTDFRGELFVGSQYLLAWSDKLVELKTICFCGRKASMVLRLDQDGRPYNEGEQVVIGGNERYVSVCRKHYKDALEEGSLTAIQERHRHI

SEQ ID NO: 75981 - protein, 892 aa, Salmonella typhi
MAVTNVAELNALVERVKKAQREYASFTQEQVDKIFRAAALAAADARIPLAKMAVAESGMGIVEDKVIKNHFASEYIYNAYKDEKTCGVLSEDDTFGTITIAEPIGIICGIVPTTNPTSTAIFKSLISLKTRNAIIFSPHPRAKEATNKAADIVLQAAIAAGAPKDLIGWIDQPSVELSNALMHHPDINLILATGGPGMVKAAYSSGKPAIGVGAGNTPVVIDETADIKRAVASVLMSKTFDNGVICASEQSVVVVDSVYDAVRERFASHGGYMLQGQELKAVQNVILKNGALNAAIVGQPAYKIAELAGFSVPETTKILIGEVTVVDESEPFAHEKLSPTLAMYRAKDFEEAVEKAEKLVAMGGIGHTSCLYTDQDNQPERVAYFGQMMKTARILINTPASQGGIGDLYNFKLAPSLTLGCGSWGGNSISENVGPKHLINKKTVAKRAENMLWHKLPKSIYFRRGSLPIALDEVITDGHKRALIVTDRFLFNNGYADQITSVLKAAGVETEVFFEVEADPTLSVVRKGAELANSFKPDVIIALGGGSPMDAAKIMWVMYEHPETHFEELALRFMDIRKRIYKFPKMGVKAKMIAVTTTSGTGSEVTPFAVVTDNATGQKYPLADYALTPDMAIVDANLVMDMPKSLCAFGGLDAVTHALEAYVSVLASEFSDGQALQALKLLKENLPASYHEGSKNPVARERVHSAATIAGIAFANAFLGVCHSMAHKLGSQFHIPHGLANALLICNVIRYNANDNPTKQTAFSQYDRPQARRRYAEIADHLGLSAPGDRTAAKIEKLLAWLESIKAELGIPKSIREAGVQEADFLAHVDKLSEDAFDDQCTGANPRYPLISELKQILLDTYYGRDFTEGEVAAKKDVVAAPKAEKKAKKSA

SEQ ID NO: 75982 - protein, 179 aa, Salmonella typhi
MNLLSALLKRYWLQLAFILLMAGAFIAGNVWSDRGWQKKWADRDSAESSQEVNAQTAARIIEQGRIIARDEAVKDAQAQAAKSAATAAGLSATVSQLRTEAKKLATRLDAAKHTANLAAAVRSKTAGADATVLADMFGSLAEEAQYYAERSDESYRAGMTCERIYNSVRESTNNPIAPH

SEQ ID NO: 75983 - protein, 335 aa, Salmonella typhi
MSLSETATQAPQPANVLLEVNDLRVTFATPDGDVTAVNDLNFTLRAGETLGIVGESGSGKSQTAFALMGLLATNGRIGGSATFNGREILNLPERELNTLRAEQISMIFQDPMTSLNPYMRVGEQLMEVLMLHKGMSKAEAFEESVRMLDAVKIPEARKRMKMYPHEFSGGMRQRVMIAMALLCRPKLLIADEPTTALDVTVQAQIMTLLNELKREFNTAIIMITHDLGVVAGICDKVLVMYAGRTMEYGKARDVFYQPVHPYSIGLLNAVPRLDSEGAEMLTIPGNPPNLLRLPKGCPFQPRCPHAMEICNNAPPLEAFSPGRLRACFKPVEELL

SEQ ID NO: 75984 - protein, 278 aa, Salmonella typhi
MSLSLSSVRRRLYHNLFDLTTRSSRRFEGLCALFALLSVLVIFVESGVGTEYHLTFDEWHIFVWLELCVTLIFTGEYLLRLFSWPEPAKYVFSFWGFIDLVTILPLYVMWLWPEISLNYMFAWRAMRAIRVLRILKLLRFMPSLRVFWSAIISARHQLILFYSFIAIVMIIFGALMYLIEGPKYGFTTLNASVYWAIVTVTTVGYGDITPHTPLGRIVASVLILIGYSVIAIPTGLITTHMSSAFQKRHWQRKCPQCQQSQHEHSAQYCNRCGSKLPD

SEQ ID NO: 75985 - protein, 133 aa, Salmonella typhi; identical to SEQ ID NO: 75017

SEQ ID NO: 75986 - protein, 179 aa, Salmonella typhi; identical to SEQ ID NO: 75016

SEQ ID NO: 75987 - protein, 212 aa, Salmonella typhi
MKKFTVAALALTTLLSGSAFAHEAGEFFMRAGPATVRPTEGAGGTLGHLNGFDVSNNTQLGLTFTYMATDNIGVELLAATPFRHKVGTGATGDIATVHLLPPTLMAQWYFGDSSSKVRPYVGVGVNYTTFFDNDFNDNGKKTGLSDLSFKDSWGAAGQVGVDYLINRDWLIGASVWYMDIDTTANYKMGGVQQHDSVRLDPWVFMFSAGYRF

SEQ ID NO: 75988 - protein, 397 aa, Salmonella typhi; identical to SEQ ID NO: 75012

SEQ ID NO: 75989 - protein, 452 aa, Salmonella typhi
MQTVLAKIVADKAIWVEARKQQQPLASFQNEIQPSTRHFYDALQGARTAFILECKKASPSKGVIRDDFDPARIASIYQHYASAISVLTDEKYFQGSFDFLPVVSQSAPQPILCKDFIIDPYQIYLARYYQADACLLMLSVLDDEQYRQLSAVAHSLKMGVLTEISNDEERERAIALGAKVVGINNRDLRDLSIDLNRTRQLAPKLGHGVTVISESGINTYGQVRELSHFANGFLIGSALMAHDDLNAAVRRVLLGENKVCGLTRAQDAKAACDAGAIYGGLIFVPSSPRAVSVEQAREVISGAPLQYVGVFKNADIADVCQKAAVLSLSAVQLHGSEDQAYVNALREALPRNVQIWKALSVSNALPARDYHHVDKYIFDNGQGGSGQRFDWSLLQGQPLDDVLLAGGLAADNCVQAAQVGCAGLDFNSGVESQPGIKDARLLASVFQTLRAY

SEQ ID NO: 75990 - protein, 531 aa, Salmonella typhi
MADILLLDNIDSFTWNLADQLRTNGHNVVIYRNHIPAQTLIDRLATMKNPVLMLSPGPGIPSEAGCMPELLTRLRGKLPIIGICLGHQAIVEAYGGYVGQAGEILHGKASSIEHDGQAMFAGLANPLPVARYHSLVGSNVPAGLTINAHFNGMVMAVRHDADRVCGFQFHPESILTTQGARLLEQTLAWAQQKLEPTNTLQPILEKLYQAQTLTQQESHQLFSAVVRGELKPEQLAAALVSMKIRGEHPNEIAGAATALLENAAPFPRPDYLFADIVGTGGDGSNSINISTASAFVAAACGLKVAKHGNRSVSSKSGSSDLLAAFGINLDMNADKSRQALDELGVCFLFAPKYHTGFRHAMPVRQQLKTRTLFNVLGPLINPAHPPLALIGVYSPELVLPIAETLRVLGYQRAAVVHSGGMDEVSLHAPTIVAELHDGEIKSYQLTAEDFGLTPYHQDQLAGGTPEENRDILTRLLQGKGDAAHEAAVAANVAMLMRLHGQEDLKANAQTVLDVLRNGTAYDRVTALAARG

SEQ ID NO: 75991 - protein, 293 aa, Salmonella typhi
MGAALSDTNYAVIYDLHSHTTASDGLLTPETLVHRAVEMRVGTLAITDHDTTAAIPAAREEISRCGLALNLIPGVEISTVWENHEIHIVGLNIDIAHPAMRDFLAQQTHRRQARGRLIAERLEKAHIPGAWEGALRLANGGAVTRGHFARFLVECGKATTMAEVFKKYLARGKTGYVPPQWCTIEQAIDVIHHSGGKAVLAHPGRYDLSAKWLKRLVAHFADHHGDAMEVAQCQQSPNERTQLATLARQHHLWASLGSDFHQPCPWIELGRKLWLPAGVEGVWQAWEQPQISQ

SEQ ID NO: 75992 - protein, 291 aa, Salmonella typhi
MSEKLQKVLARAGHGSRREIESIIEAGRVSVDGKIATLGDRVEVTPGLKIRIDGHLISVKESAEQICRVLAYYKPEGELCTRNDPEGRPTVFDRLPKLRGARWIAVGRLDVNTCGLLLFTTDGELANRLMHPSREVEREYAVRVFGQVDESKLRDLSRGVQLEDGPAAFKTIKFSGGEGINQWYNVTLTEGRNREVRRLWEAVGVQVSRLIRVRYGDIPLPKGLPRGGWTELDFAQTNYLRGLVELPPETSSKVAVEKDRRRMKANQIRRAVKRHSQIAGGRRSGGRNNNG

SEQ ID NO: 75993 - protein, 253 aa, Salmonella typhi; identical to SEQ ID NO: 75008

SEQ ID NO: 75994 - protein, 865 aa, Salmonella typhi
MGKALVIVESPAKAKTINKYLGNDYVVKSSVGHIRDLPTSGSAAKKSADSTSTKTAKKPKKDERGALVNRMGVDPWHNWDAHYEVLPGKEKVVSELKQLAEKADHIYLATDLDREGEAIAWHLREVIGGDDARYSRVVFNEITKNAIRQAFEQPGELNINRVNAQQARRFMDRVVGYMVSPLLWKKIARGLSAGRVQSVAVRLVVEREREIKAFVPEEFWEIDANTTTPSGEALPLQVTHQNDKPFRPVNREQTLAAVSLLEKARYSVLEREDKPTSSKPGAPFITSTLQQAASTRLGFGVKKTMMMAQRLYEAGYITYMRTDSTNLSQDAVNMVRGYIGDNFGKKYLPDNPNQYASKENSQEAHEAIRPSDVAVMAESLKDMEADAQKLYQLIWRQFVACQMTPAQYDSTTLTVGAGEFRLKARGRILRFDGWTKVMPALRKGDEDRTLPAVNKGDALTLLELTPAQHFTKPPARFSEASLVKELEKRGIGRPSTYASIISTIQDRGYVRVENRRFYAEKMGEIVTDRLEENFRELMNYDFTAQMEDSLDQVANHQAEWKAVLDNFFSDFTQQLDKAEKDPEEGGMRPNQMVLTSIDCPTCGRKMGIRTASTGVFLGCSGYALSPKERCKTTINLVPENEVLNVLEGDDAETNALRAKRRCQKCGTAMDSYLIDPKRKLHVCGNNPTCDGYEIEEGEFRIKGYDGPIVECEKCGSEMHLKMGRFGKYMACTNDECKNTRKILRNGEVAPPKEDPVPLPELPCEKSDAYFVLRDGAAGIFLAANTFPKSRETRAPLVEELYRFRDRLPEKLRYLADAPQQDPEGNKTVVRFSRKTKQQYVAAEKDGKATGWSAFFVDGKWVEGKK

SEQ ID NO: 75995 - protein, 254 aa, Salmonella typhi
MLSIARRTAAGAALLLIMPLAVWVSGWQWQPGHQVWWLKTLFWITETVTKPWGVITHVILCGWFLWCLRFRLRAAIMLFAILGGAIIVGQGVKSWVKERVQEPRPFVVWLEKTHHIPVDEFYTLKRTERGHLVKEQLAGQQNIPVFLRQHWQKETGFAFPSGHTMFAASWALLAVGLLWPRRRTFTIAFLLVWATGVMGSRLLLGMHWPRDLVVATLISWLLVTLATWLAQRICGPLMPPREEAQEIAEREQES

SEQ ID NO: 75996 - protein, 72 aa, Salmonella typhi
MMNCPKCGHSAHTRSSFQVTDSTKERYCQCQNINCGSTFVTHETVVRFIVTPALVNNAPPHPTVSGQGHMNF

SEQ ID NO: 75997 - protein, 660 aa, Salmonella typhi
MMKQIQEQTALNPLHSHWRLADDRNVLYLSPTGETDAEKTVELSPEQAGRIREITAITSSLLITLLIEKQVTAVHLVGRKINNREWAGSLATWPDTPAVAPTQAQELSFAEQIVSEANSVIAILDSRGKICRFNRLCEEYTGLKERDVIGQSVFKLFMSRREAVASRHYIENFFRNGNAYEIERWIKTRKGQRLFLFRNKFVHNGSGKNEIFLICAGTDITEERRAQERLRILANTDTVTGLPNRNAIHEFINHAIASAGESQVGIVYLDLDNFKKINDAYGHMFGDQLLQAVSLALLSCLEEDQLLARLGGDEFIVLVAHTSQAALEAVASRILTRLRQPFRIGLIEVYTGCAIGISLAPRHGQDSESLIRTADTAMYNAKEGGRGQFCVFSPEMNQRVFDYHWLDTNLRKALENDQLLIHYQPKITWRGEVRSLEALVRWQSPERGLIPPLEFISYAEESGLIVPLGRWVILDVVRQIAKWRDKGINLRVAVNFSARQLADQTLFTALKQALYDLNFEYCPIDVELTESCLIENDTLALSVIQQFSQLGAQIHLDDFGTGYSSLSQLARFPIDAVKLDQAFVRDIHKQPLSQSLARAIVAVAQALNLQVIAEGVENAKEDAFLTKNGVNERQGFLFAKPMPAVSFERWYKRYQTKKMR

SEQ ID NO: 75998 - protein, 644 aa, Salmonella typhi
MFQDNPLLAQLKQQLHSQTPRAEGVVKATEKGFGFLEVDAQKSYFIPPPQMKKVMHGDRIVAVIHTEKERESAEPEELIEPFLTRFVGKVQGKNDRLSIVPDHPLLKDAIPCRAARGVQHEFKEGDWAVAEMRRHPLKGDRSFYADLTQYITFADDHFVPWWVTLARHNLEKEAPNGVATEMLDEGLERQDLTALNFVTIDSASTEDMDDALYAEELADGRLQLTVAIADPTAWIAEGSKLDNAAKIRAFTNYLPGFNIPMLPRELSDDLCSLRANEVRPALACRMIIAADGTIDDDIAFFAATIESKAKLVYDNVSDWLENNSTWQPENEGIAQQIRLLHRICLSRSEWRHHHALVFKDRPDYRFVLGEKGEVLDIVAEPRRIANRIVEESMIAANLCAARVLRDKLGFGIYNVHTGFDPANADALAALLKTHGLHVDAEEVLTLEGFCKLRRELDAQPSGFLDSRIRRFQSFAEISTEPGPHFGLGLEAYATWTSPIRKYGDMINHRLLKAVIKGEAIARPQEDITQQMAERRRLNRMAERDVGDWLYARFLNDKAGTNTRFAAEIIDVSRGGMRVRLVDNGAIAFIPAPFLHAVRDELVCSQENGTVQIKGETVYKVTDVIDVTIAEVRMETRSIIARPAA

SEQ ID NO: 75999 - protein, 306 aa, Salmonella typhi
MEQCRKAGKSHWYHETQSTMSSQTPLSLMPEAAYVNDRFLLDLAVAETALTPFESWLKPARQLADVLFPRTVLNDRLHTFSAYERMSTALTAAQVFGVQRLCRHYAARLAPLPGPDASRESNQRLAQITQYARQLAGSPSVINTRAREQLAEVGLTARDTVLINQIIGFIGFQARVAAIFQAFCRLPVRELPGQEMQRFARAARFQNPQTTWRPAASLVEYPLAHTKVRRQYSSSQCQIMAPVLMRDPSSFALLERILTSTLHTASPPSLLPLITLLTSRINGSAACFNEQATQPGAWRRAVITLR

SEQ ID NO: 76000 - protein, 262 aa, Salmonella typhi
MGFLSGKRILVTGVASKLSIAYGIAQAMHREGAELAFTYQNDKLKGRVEEFAAQLGSSIVLPCDVAEDASIDAMFAELGNVWPKFDGFVHSIGFAPGDQLDGDYVNAVTREGFKIAHDISSYSFVAMAKACRTMLNPGSALLTLSYLGAERAIPNYNVMGLAKASLEANVRYMANAMGPEGVRVNAISAGPIRTLAASGIKDFRKMLAHCEAVTPIRRTVTIEDVGNSAAFLCSDLSAGISGEVVHVDGGFSIAAMNELELK

SEQ ID NO: 76001 - protein, 268 aa, Salmonella typhi
MVETLLEVRNLSKTFRYRTGWFRRQTVDAVKPLSFTLRERQTLAIIGENGSGKSTLAKMLAGMIEPTSGELLIDDHPLHYGDYSFRSQRIRMIFQDPSTSLNPRQRISQILDFPLRLNTVLEPEQRRKQIVETMRMVGLLPDHVSYYPHMLAPGQKQRLGLARALILRPKVIIADEALASLDMSMRSQLINLMLELQEKQGISYIYVTQHIGMMKHISDQVLVMHQGVVVERGSTADVLASPLHELTRRLIAGHFGEALTADAWRKDR

SEQ ID NO: 76002 - protein, 518 aa, Salmonella typhi
MKVKLLAAGILFTLPFWACAKDVTIIYTNDLHAHVEPYKVPWIADGKRDIGGWANITTLVKQEKAKNKATWFFDAGDYFTGPYISSLTKGKAIIDILNTMQYDAATIGNHEFDHGWDNTLLQLSRAKFPIVQGNIFYEDSSKSFWDKPYTIVEKDGVKIGVIGLHGVFAFNDTVSAATRVGIEARDEIKWLQRYIDELKGKVDLTVALIHEGTPARQSSMGNTDVRRALDKDIQTASQVKGLDILITGHAHVGTPEPIKVGNTLILSTDSGGIDVGKLVLDYQEKPHQFTVKNFELKTIFADEWKPDPQTKQVIDGWNKKLDKVVQQTVAQSPVELTRAYGESSSLGNLAADALLFTAGKDTQLALTNSGGIRNEIPAGAVTMGAVISTFPFPNELVTMDLTGKQLRSLMEHGAGLSNGVLQVSKGLEMKYDSSKPIGQRVTVLTLNGKPIDDAAVYHIATNSFLADGGDGFAAFTEGQARNTSGGYYVSNAIVDYFKAGNTITDEQLKGMRVADVKK

SEQ ID NO: 76003 - protein, 105 aa, Salmonella typhi; identical to SEQ ID NO: 73308

SEQ ID NO: 76004 - protein, 176 aa, Salmonella typhi
MTTIVSVRRNGHVVIAGDGQATLGNTVMKGNVKKVRRLYNDKVIAGFAGGTADAFTLFELFERKLEMHQGHLVKAAVELAKDWRTDRMLRKLEALLAVADETASLIITGNGDVVQPENDLIAIGSGGPYAQAAARALLENTELGAREIAEKALDIAGDICIYTNHFHTIEELTAKA

SEQ ID NO: 76005 - protein, 281 aa, Salmonella typhi
MSQTSTLKGQCIAEFLGTGLLIFFGVGCVAALKVAGATFGQWEISVIWGLGVAMAIYLTAGVSGAHLNPAVTIALWLFACFDKRKVVPFIISQVAGAFCAAALVYGLYYNLFVDFEQTHHIVRGSVESLDLAGIFSTYPNPHINFVQAFAVEMVITAILMGLILALTDDGNGVPRGPLAPLLIGLLIAVIGASMGPLTGFAMNPARDFGPKMFAGLAGWGEIAFTGGRDIPYFLVPLFGPIVGAILGAFAYRKFIGRHLPCDICVVEEKDSTAATQQNASL

SEQ ID NO: 76006 - protein, 501 aa, Salmonella typhi
MTEKYIVALDQGTTSSRAVVMDHDANIVSVSQREFEQIYPKPGWVEHDPMEIWASQSSTLVEVLAKADISSDQIAAIGITNQRETAIVWERETGKPIYNAIVWQCRRTANICEQLKRDGLEDYIRDNTGLVVDPYFSGTKVKWILDHVEGSRERAKRGELLFGTVDTWLIWKMTQGRVHVTDYTNASRTMLFNIHDLDWDDKMLDVLDIPRAMLPQVRKSSEVYGQTNIGGKGGTRIPIAGIAGDQQAALFGQLCVKEGMAKNTYGTGCFMLMNTGEKAVKSENGLLTTIACGPSGEVNYALEGAVFMAGASIQWLRDEMKLISDAFDSEYFATKVKDTNGVYVVPAFTGLGAPYWDPYARGAIFGLTRGVNSNHIIRATLESIAYQTRDVLEAMQADSGIRLHALRVDGGAVANNFLMQFQSDILGTRVERPEVREVTALGAAYLAGLAVGYWQNLDELQEKAVIEREFRPGIETTERNYRYSGWKKAVKRAMAWEEHDK

SEQ ID NO: 76007 - protein, 366 aa, Salmonella typhi
MCGGNSAHTSIIPSLPCATLRATPFCYEFVMRRELAIEFSRVTEAAALAGYKWLGRGDKNTADGAAVNAMRIMLNQVNIDGTIVIGEGEIDEAPMLYIGEKVGTGHGDAVDIAVDPIEGTRMTAMGQANALAVLAVGDKGCFLNAPDMYMEKLIVGPGAKGAIDLNLPLADNLRNIADALGKPLGDLTVTILAKPRHDEVIAEMAKLGVRVFAIPDGDVAASILTCMPDSEVDVLYGIGGAPEGVVSAAVIRALDGDMQGRLLARHDVKGDSEENRRIGEQELARCKAMGIEAGKALCLGDMARSDNVIFSATGITKGDLLEGISRKGHIATTETLLIRGKSRTIRRIQSIHYLDRKDPDVQAHIL

SEQ ID NO: 76008 - protein, 466 aa, Salmonella typhi
MAKTLYEKLFDAHVVFEAPNETPLLYIDRHLVHEVTSPQAFDGLRAHHRPVRQPGKTFATMDHNVSTQTKDINASGEMARIQMQELIKNCNEFGVELYDLNHPYQGIVHVMGPEQGVTLPGMTIVCGDSHTATHGAFGALAFGIGTSEVEHVLATQTLKQGRAKTMKIEVTGNAAPGITAKDIVLAIIGKTGSAGGTGHVVEFCGDAIRALSMEGRMTLCNMAIEMGAKAGLVAPDETTFNYVKGRLHAPKGRDFDEAVEYWKTLKTDDGATFDTVVTLRAEEIAPQVTWGTNPGQVISVTDIIPDPASFSDPVERASAEKALAYMGLQPGVPLTDVAIDKVFIGSCTNSRIEDLRAAAEVAKGRKVAPGVQALVVPGSGPVKAQAEAEGLDKIFIEAGFEWRLPGCSMCLAMNNDRLNPGERCASTSNRNFEGRQGRGGRTHLVSPAMAAAAAVTGHFADIRSIK

SEQ ID NO: 76009 - protein, 164 aa, Salmonella typhi
MMRRILSVLLENESGALSRVIGLFSQRGYNIESLTVAPTDDPTLSRMTIQTVGDEKVLEQIEKQLHKLVDVLRVSELGQGAHVEREIMLVKIQASGYGREEVKRNTEIFRGQIIDVTPTLYTVQLAGTSDKLDAFLASLRDVAKIVEVARSGVVGLSRGDKVMR

SEQ ID NO: 76010 - protein, 152 aa, Salmonella typhi
MFRGATLVNLDSKGRLTVPTRYREQLIESATGQIVCTIDIHHPCLLLYPLPEWEIIEQKLSRLSSMNPVERRVQRLLLGHASECQMDGAGRLLIAPVLRQHAGLTKEVMLVGQFNKFELWDETTWYQQVKEDIDAEQSATETLSERLQDLSL

SEQ ID NO: 76011 - protein, 313 aa, Salmonella typhi
MMENFKHTTVLLDEAVNGLNIRPDGIYIDGTFGRGGHSRLILSQLGEEGRLLAIDRDPQAIAVAQTINDPRFSIIHGPFSALADYVAERELTGKIDGILLDLGVSSPQLDDAERGFSFMRDGPLDMRMDPTRGQSAAEWLQTAEEADIAWVLKTFGEERFAKRIAHAIVERNREQPMTRTKELAEVVAAATPVKDKFKHPATRTFQAVRIWVNSELEEIEQALKSSLSVLASGGRLSIISFHSLEDRIVKRFMREQSRGPQVPAGLPMTEAQLKKLGGRELRALGKLMPGEKEVAENPRARSSVLRIAERTNA

SEQ ID NO: 76012 - protein, 291 aa, Salmonella typhi
MADLDDIKDGKDFHTDKPQTNTLFSLKGCGALDWGMQSRLARIFNPRTRKTVMLAFDHGYFQGPTTGLERIDINIAPLFEYADVLMCTRGILRSVVPPAINKPVVLRASGANSILTELSNEAVAVAMDDAVRLNSCAAAAQVYIGSEHEHQSIKNIIQLIDAGLRVGMPIMAVTGVGKDMARDQRYFSLATRIAAEMGAQIIKTYYVDKGFERIAAGCPVPIVIAGGKKLPEREALEMCYQAIDQGASGVDMGRNIFQSEDPVAMIKAVHAVVHHNETAERAYELFLSEKG

SEQ ID NO: 76013 - protein, 347 aa, Salmonella typhi
MLKFIQNNREATALLAIVCLFVFLGALDSQYLSVQTLTMVFSSAQILMLLAIGATMVMLTRNIDVSVGSTTGMCAVLLGVMLNAGYSLPVACLATLILGIVAGFFNGVLVAWLKIPAIVATLGTLGLYRGIMLLWTGGKWIEGLPAGLKQLSAPVFLGISAIGWFTLVLALLMAWLLAKTAFGRNFYATGDNLQGARQLGVRTEMVRIMAFSLNGGMAALAGIVFASQIGFIPNQTGTGLEMKAIAACVLGGISLLGGSGTVIGAILGAYFLTQIDSVLVLLRIPAWWNDFIAGLVLLGVLVFDGRLRCALQRNLRRQKYARFISPPTPLQAEAKTHAQQNKNKEVA

SEQ ID NO: 76014 - protein, 264 aa, Salmonella typhi
MNILKNNSYYFMKLITVCELIILLMSRDIKTRYNGNLLNYMMVLAVPLVWISITVISFQYLNRSVPISTDDISFVIAGILPYLLFRYTITATMRTHSFSTSLAVVSQVKKRHVIFSLAAIEFVNAVIIYIIISLINFLIFSRWEAQKPFLIFEGMVIAWLLGLSFGYFCDALSERFPLVYKAVPVMLRPMFLISAVFYTANELPYSLLSIFSWNPLLHANEIVREGMFEGYHSLYLEPFYPLAFSATLFLAGLIFHLICDTENH

SEQ ID NO: 76015 - protein, 319 aa, Salmonella typhi
MSDNTLVSDYGMCEEEQVARIAWFYYHDGLTQSEISERLGLTRLKVSRLLEKGHQSGIIRVQINSRFEGCLEYENALRNHFALQNIRVLPALPDADIGLRLGIGAAHMLMESLRPQQLLAVGFGEATMTTLKRLSGFISAQQIRLVTLSGGVGPYMTGIGQLDAACSVSIMPAPLRASSQEIACTLRNENSVRDVMLTAQAADAAIVGIGAINQKDQASILKSGYITQGEQLMIGRKGAVGDILGYFFDAHGEIIPDIKIHNELIGLKLNSLSTIPTVIGVAGGEQKAEAIIAAMRGNYINALVTDQKTAGKIIQLIEK

SEQ ID NO: 76016 - protein, 495 aa, Salmonella typhi
MADRNLRDLLAPWVAGLPARELREMTLDSRVAAAGDLFVAVVGHQADGRRYIPQAIAQGVAAIIAEAKDEASDGEIREMHGVPVVYLSQLNERLSALAGRFYHEPSENMRLVAVTGTNGKTTTTQLLAQWSQLLGETSAVMGTVGNGLLGKVIPTENTTGSAVDVQHVLASLVAQGATFGAMEVSSHGLVQHRVAALKFAASVFTNLSRDHLDYHGDMAHYEAAKWMLYSTHHHGQAIVNADDEVGRRWLASLPDAVAVSMEGHINPNCHGRWLKAEAVEYHDRGVTIRFASSWGEGEIESCLMGAFNVSNLLLALATLLALGYPLTDLLKTAARLQPVCGRMEVFTAPGKPTVVVDYAHTPDALEKALQAARLHCAGKLWCVFGCGGDRDKGKRPLMGAIAEEFADIVVVTDDNPRTEEPRAIINDILAGMLDAGQVRVMEGRAEAVTNAIMQAKDNDVVLIAGKGHEDYQIVGTQRLDYSDRVTAARLLGVIA

SEQ ID NO: 76017 - protein, 452 aa, Salmonella typhi
MISVTLSKIADVLGAEHRGADLTLDTVITDTRKVTPGCLFVALKGERFDAHDFADKAKANGAGALLVSRPLDIDLPQVIVKDTRQAFGQLAAWVRMQVPARVVALTGSSGKTSVKEMTAAILSQCGNTLYTASNFNNDIGVPITLLRLNHDYDYAVIELGANHQGEIAWTVSLTRPEAALVNNLAAAHLEGFGSLAGVAKAKGEIYTGLPENGIAIMNADNNDWLNWQSIIGDRQVWRFSPNAANSDFTAANIHVTSHGTEFTLQTPMGSIDVLLPLPGRHNIANALAAAALSMAVGATLAAVKAGLAALKAVPGRLFPIQLSENQLVLDDAYNANVGSMTAAVQVLSEMPGYRVLVVGDMAELGAESEACHLQVGEAAKAAGIDRVLSTGKLSQVISHASGVGEHFADKAALIARLHALLQEQPMMTILVKGSRSAAMEDVVHALQEKGSC

SEQ ID NO: 76018 - protein, 360 aa, Salmonella typhi
MLVWLAEHLVKYYSGFNVFSYLTFRAIVSLLTALFISLWMGPRMIARLQKLSFGQVVRNDGPESHFSKRGTPTMGGIMILTAIVISVLLWAYPSNPYVWCVLVVLIGYGIIGFVDDYRKVVRKDTKGLIARWKYFWMSVIALGVAFALYLVGKDTPATQLVVPFFKDVMPQLGLFYILLSYFVIVGTGNAVNLTDGLDGLAIMPTVFVAAGFALVAWATGNMNFANYLHIPYLRHAGELVIVCTAIVGAGLGFLWFNTYPAQVFMGDVGSLALGGALGIIAVLLRQEFLLVIMGGVFVVETLSVILQVGSFKLRGQRIFRMAPIHHHYELKGWPEPRVIVRFWIISLMLVLIGLATLKVR

SEQ ID NO: 76019 - protein, 438 aa, Salmonella typhi
MADYQDKNVVIIGLGLTGLSCVDFFLARGVTPRVMDTRVTPPGLDKLPQEVERHVGGLNDEWLLAADLIVASPGIALAHPSLSAAASAGVEIVGDIELFCREAQAPIVAITGSNGKSTVTTLVGEMAKAAGVNVGVGGNIGLPALMLLDADRELYVLELSSFQLETTSSLQAAAATVLNVTEDHMDRYPFGLQQYRAAKLRVYEKAKVCVVNADDALTMPVRGADERCVSFGVNMGDYHLNRQQGETWLRVKGEKVLNVKEMKLSGQHNYTNALAALALADAVGLPRASSLKALTTFTGLAHRFQLALEHNGVRWINDSKATNVGSTEAALNGLHVDGTLHLLLGGDGKSADFSPLARYLTGDRIRLYCFGRDGAQLAALRPEIAQQTETMEEAMRLLAPHVQPGDMVLLSPACASLDQFKNFEQRGDVFTRLAKELG

SEQ ID NO: 76020 - protein, 414 aa, Salmonella typhi; identical to SEQ ID NO: 75188

SEQ ID NO: 76021 - protein, 355 aa, Salmonella typhi
MSGQPKRLMVMAGGTGGHVFPGLAVAHHLMAQGWQVRWLGTSDRMEADLVPKHGIDIDFIRISGLRGKGVKALLAAPLRIFNAWRQARAIMKRFKPDVVLGMGGYVSGPGGLAAWSLGIPVVLHEQNGIAGLTNQWLAKIATTVMQAFPGAFPNAEVVGNPVRTDVLALPLPQVRLAGRDGPIRVLVVGGSQGARVLNQTMPQVAARLGDTVTIWHQSGKGAQLTVEQAYAGAGQPQHKVTEFIDGMAAAYAWADVVVCRSGALTVSEIAAAGLPAIFVPFQHKDRQQYWNALPLENAGAAKIFEQPQFTVEAVADTLAGWSREALLTMAERARAVSIPDATERVASEVSRVART

SEQ ID NO: 76022 - protein, 491 aa, Salmonella typhi
MNTQQLAKLRSIVPEMRRVRHIHFVGIGGAGMGGIAEVLANEGYQISGSDLAPNPVTQQLTSLGATIFFNHRPENVRDASVVVVSSAISADNPEIVAAHEARIPVIRRAEMLAELMRFRHGIAIAGTHGKTTTTAMVSSIYAEAGLDPTFVNGGLVKAAGVHARLGHSRYLIAEADESDASFLHLQPMVAIVTNIEADHMDTYHGDFENLKQTFINFLHNLPFYGRAVMCVDDPVIRELLPRVGRQTTTYGFSEDADVRVEDYQQIGPQGHFTLLRQGMPDLHVTLNAPGRHNALNAAAAVAVATEEGIDDDAILRALESFQGTGRRFDFLGEFPLEPVNGKAGTAMLVDDYGHHPTEVDATIKAARAGWPDKNLVMLFQPHRYTRTRDLYDDFANVLTQVDALLMLDVYPAGEAPIPGADSRSLCRTIRNRGKIDPILVSDPAQVATMLAPVLTGNDLILVQGAGNVGKIARYLSEIKLKPQIQEEEQHG

SEQ ID NO: 76023 - protein, 276 aa, Salmonella typhi; identical to SEQ ID NO: 73038

SEQ ID NO: 76024 - protein, 530 aa, Salmonella typhi
MARLCTHTESGHYLMALDAGTGSVRAVIFDLQGKQIAVGQAEWQHLAVPDVPGSMEFDLAKNWQLACQCIRQALQKAAIPATAIAAVSACSMREGIVIYDSNGEPIWACANVDARAAHEVSELKELHDNTFEEEVYRCSGQTLALSAIPRLLWLAHHRPDIYHRASTVTMISDWMAFMLSGELAVDPSNAGTTGLLDLVTRNWKRSLLQMAGLRSDILSPVKETGTLLGHISQKAAEQCDLQAGTPVIVGGGDVQLGCLGLGVVRPAQTAVLGGTFWQQVVNLPAPVTDPNMNVRINPHVIPGMVQTESISFFTGLTMRWFRDAFCAEEKLIAERLGIDAYSLLEDMASRVPPGAHGVMPIFSDVMRFKRWYHAAPSFINLSIDPEKCNKATLFRALEENAAIVSACNLQQIAAFSGVQADSLVFAGGGSKGKLWSQILADVTGLTVHVPVVKEATALGCAIAAGVGVGIWPSLAETGEKLVRWDREHKPNPENFAVYQQAREKWQAVYQDQRALVDGGLTTSLWKAPGL

SEQ ID NO: 76025 - protein, 320 aa, Salmonella typhi; identical to SEQ ID NO: 72988

SEQ ID NO: 76026 - protein, 420 aa, Salmonella typhi; identical to SEQ ID NO: 75193

SEQ ID NO: 76027 - protein, 383 aa, Salmonella typhi
MFEPMELTNDAVITVIGVGGGGGNAVEHMVRERIEGVEFFAVNTDAQALRKTAVGQTIQIGSGITKGLGAGANPEVGRNAADEDREALRAALEGADMVFIAAGMGGGTGTGAAPVVAEVAKDLGILTVAVVTKPFNFEGKKRMAFAEQGITELSKHVDSLITIPNDKLLKVLGRGISLLDAFGAANDVLKGAVQGIAELITRPGLMNVDFADVRTVMSEMGYAMMGSGVASGEDRAEEAAEMAISSPLLEDIDLSGARGVLVNITAGFDLRLDEFETVGNTIRAFASDNATVVIGTSLDPDMNDELRVTVVATGIGMDKRPEITLVTNKQVQQPVLDRYQQHGMAPLTQEQKTVAKVVNDNAPQAAKEPDYLDIPAFLRKQAD

SEQ ID NO: 76028 - protein, 305 aa, Salmonella typhi
MIKQRTLKRIVQATGVGLHTGKKVTLTLRPAPANTGVIYRRTDLNPPVDFPADAKSVRDTMLCTCLVNEHDVRISTVEHLNAALAGLGIDNIVIEVNAPEIPIMDGSAAPFVYLLLDAGIDALNCAKKFVRIKETVRVEDGDKWAEFRPYNGFTLDFTIDFNHPAIDSSSQRYAMNFSADAFMRQISRARTFGFMRDIEYLQSRGLCLGGSFDCAIVVDDYRVLNEDGLRFEDEFVRHKMLDAIGDLFMCGHNIIGAFTAYKSGHALNNKLLQAVLAKQEAWEFVTFQDDAELPLAFKAPSTVLA

SEQ ID NO: 76029 - protein, 901 aa, Salmonella typhi
MLIKLLTKVFGSRNDRTLRRMRKAVSLINAMEPEMEKLSDDELKAKTNEFRARIGKGESVESLIPEAFAVVREASKRVFGMRHFDVQLLGGMVLNDRCIAEMRTGEGKTLTATLPAYLNALSGKGVHVVTVNDYLAQRDAENNRPLFEFLGMSVGINLPGMPAPAKREAYAADITYGTNNEYGFDYLRDNMAFSPEERVQRKLHYALVDEVDSILIDEARTPLIISGPAEDSSEMYKKVNKIIPHLIRQEKEDSDTFQGEGHFSVDEKARQVNLTERGLVLIEELLVQEGIMDEGESLYSPGNIMLMHHVTAALRAHALFTRDVDYIVKDGEVIIVDEHTGRTMQGRRWSDGLHQAVEAKEGVEIQNENQTLASITFQNYFRLYEKLAGMTGTADTEAFEFSSIYKLDTVVVPTNRPMIRKDLPDLVYITEAEKIQAIIEDIKERTANGQPVLVGTISIEKSEVVSRELTKAGIKHNVLNAKFHANEAGIVAQAGYPAAVTIATNMAGRGTDIMLGGSWQAEVAALEAPTEEQIAQIKADWQVRHDAVLAAGGLHIIGTERHESRRIDNQLRGRSGRQGDPGSSRFYLSMEDALMRIFASDRVSGMMRKLGMKPGEAIEHPWVTKAIANAQRKVESRNFDIRKQLLEYDDVANDQRRAIYTQRNELLDVSDVSDTINSIREDVFKATIDAYIPPQSLEEMWDIPGLQERLKNDFDLEMPIAEWLDKEPELHEETLRERILAQSIEVYQRKEEVVGAEMMRHFEKGVMLQTLDSLWKEHLAAMDYLRQGIHLRGYAQKDPKQEYKRESFAMFAAMLESLKYEVISTLSKVQVRMPEEVEAMEMQRREEAERLAQMQQLSHQDDDAAVAADLAAQTGERKIGRNDPCPCGSGKKYKQCHGRLS

SEQ ID NO: 76030 - protein, 329 aa, Salmonella typhi
MQYRTLGANGPRVSAIGLGCMGMSAFYGAHDDSTSIKTLHYALDQGVTLLDTADMYGPYTNERLVGRAIADRRDRVFLATKFGIVLDPANPMARGVNGRPEYVRRSCEQSLQRLGVDHIDLYYQHRVDPSVPIEETVGAMADLVREGKVRYLGLSEASTQTLERAHNVHPITALQSEYSLWSREAEISALSTCERLGIGFVAYSPLGRGFLTGTIKTPEDFAANDFRRTNPRFMGENFSRNLRLAEAIKQMAREKECTPAQLALAWLLARNRHLVPIPGTRHCARVDENLGALSLTLSPQELAAIEAVFPHDAAAGPRYWPEIMSTLNR

SEQ ID NO: 76031 - protein, 313 aa, Salmonella typhi
MKAGLIMRHDVMSVLHAFCMIAENHSFTRAAAQLHISTSALSQNMRQLEDELGVKLLNRTTRRVGLTEAGHAFLASIRPALNHIDEAMEHACQSRDIPGGTLRLTVPRTAATLLLQPNLAGFMRDYPDIRLDIDVNDGFVDLINERFDAGIRFGDAVQLDMNVVPLGDVLRPAIVASPAYLARFGTPLHPQELINHRCLCHRFTRESGLYRWEFVHGAQRLEITPEAALMVNDKALRLSAARDGAELTYVFEQDVHEDLQDGRLCSVLEEWLPAADRFYLYYPGRAHMAPKLRVFIDYFCHKAILPSQQSYHR

SEQ ID NO: 76032 - protein, 247 aa, Salmonella typhi; identical to SEQ ID NO: 72960

SEQ ID NO: 76033 - protein, 166 aa, Salmonella typhi
MRKVTAAVMASTLAFSFLSHAAEVVTSDNWHPGDGATQRSAQNHMFDGISLTEHQRQQMRDLMQQARHEQPPVNVSEMETMHRLVTAEKFDESVVRAQAEKMAQEQVARQVEMARVRNQMYRLLTPEQQAVLNEKHQQRMEQLRDVAQWQKSSSLKLLSSSNSRSQ

SEQ ID NO: 76034 - protein, 232 aa, Salmonella typhi
MNKILLVDDDRELTSLLKELLEMEGFNVLVAHDGEQALELLDDSIDLLLLDVMMPKKNGIDTLKALRQTHQTPVIMLTARGNELDRVLGLELGADDYLPKPFNDRELVARIRAILRRSHWSEQQQSSDNGSPTLEVDALSLNPGRQEASFDGQTLELTGTEFTLLYLLAQHLGQVVSREHLSQEVLGKRLTPFDRAIDMHISNLRRKLPERKDGHPWFKTLRGRGYLMVSAS

SEQ ID NO: 76035 - protein, 191 aa, Salmonella typhi
MQREDILGEALKLLETQGIADTTLEMVAERVNRPLDTLQRFWPDKEAILYDALRYLSQQVDIWRRQLLLDETFSAEQKLLARYSALSECVSNNRYPGCLFIAACTFYPDPTHPIHQLANQQKRAAHDFTHGLLTTLEIDDPAMVARQMELVLEGCLSRMLVNRSQADVDTAQRLAEDILRFAQCRQGGALT

SEQ ID NO: 76036 - protein, 165 aa, Salmonella typhi; identical to SEQ ID NO: 73507

SEQ ID NO: 76037 - protein, 548 aa, Salmonella typhi; identical to SEQ ID NO: 75259

SEQ ID NO: 76038 - protein, 123 aa, Salmonella typhi
MIMGNNMHVKYLAGIVGAALLMAGCSSSNELTAAGQNVRFVEDKPGAECQLIGTATGKQSNWFSGQHGEEGGSMRGAANDLRNQAAAMGGNVLYGVSSPSQGMLSSFVPTASEMNGQVYKCPN

SEQ ID NO: 76039 - protein, 419 aa, Salmonella typhi
MTTQLEQAWELAKQRFAAVGIDVEEALRQLDRLPVSMHCWQGDDVAGFENPEGSLTGGIQSTGNYPGKARNATELRADLEQALRLIPGPKRLNLHAIYLESDTPVARDQIKPEHFKNWVEWAKANRLGLDFNPTCFSHPLSADGFTLSHPDAKIRQFWIDHCKASRRVSAYFGEQLGTPSVMNIWIPDGMKDITVDRLAPRQRLLEALDEVISEKFDPAHHIDAVESKLFGIGAESYTVGSNEFYMGYATSRQTALCLDAGHFHPTEVISDKISAAMLYVPRLLLHVSRPVRWDSDHVVLLDDETQAIASEIVRHNLFDRVHIGLDFFDASINRVAAWVIGTRNMKKALLRALLEPTDQLRQLEASGDYTARLAMLEEQKSLPWQAVWEMYCQRHDTPAGSQWLDSVRTYEKEILSKRS

SEQ ID NO: 76040 - protein, 104 aa, Salmonella typhi
MIRKAFVMQVNADAHEEYQRRHNPIWPELEAVLKSHGAHHYAIYLDQERNLLFATVEIESEERWNAVASTDVCQRWWKHMRDVMPANPDNSPVSAELKEVFYLQ

SEQ ID NO: 76041 - protein, 254 aa, Salmonella typhi; identical to SEQ ID NO: 75203

SEQ ID NO: 76042 - protein, 629 aa, Salmonella typhi
MAIEIKVPDIGTDEVEITEILVKVGDKVEAEQSLITVEGDKASMEVPSPQAGVVKEIKVSVGDKTETGALIMIFDSADGAADAAPAQAEEKKEAAPAAAPAAAAAKDVHVPDIGSDEVEVTEVMVKVGDTVEAEQSLITVEGDKASMEVPAPFAGTVKEIKVNTGDKVSTGSLIMVFEVAGEAGAAAPAKAEAAPAAAAPAAATGVKDVNVPDIGGDEVEVTEVMVKVGDKVTAEQSLITVEGDKASMEVPAPFAGTVKEIKISTGDKVKTGSLIMVFEVEGAAPAAAPAKQEAAAPAPAAKAEKPAAPAAKAEGKSEFAENDAYVHATPLIRRLAREFGVNLAKVKGTGRKGRILREDVQAYVKDAIKRAEAAPAAAGGGIPGMLPWPKVDFSKFGEVEEVELGRIQKISGANLSRNWVMIPHVTHFDKTDITDLEAFRKQQNAEAEKRKLDVKYTPVVFIMKAVAAALEQMPRFNSSLSEDGQRLTLKKYINIGVAVDTPNGLVVPVFKDVNKKSVTELSRELTTISKKARDGKLTAGEMQGGCFTISSIGGLGTTHFAPIVNAPEVAILGVSKSAMEPVWNGKEFVPRLMMPISLSFDHRVIDGADGARFITIINNMLSDIRRLVM

SEQ ID NO: 76043 - protein, 475 aa, Salmonella typhi
MMSTEIKTQVVVLGAGPAGYSAAFRCADLGLETVIVERYNTLGGVCLNVGCIPSKALLHVAKVIEEAKALAEHGIVFGEPKTDIDKIRTWKEKVITQLTGGLAGMAKGRKVKVVNGLGKFTGANTLEVEGENGKTVINFDNAIIAAGSRPIQLPFIPHEDPRVWDSTDALELKEVPKRMLVMGGGIIGLEMGTVYHALGSEIDVVEMFDQVIPAADKDIVKVFTKRISKKFNLMLETKVTAVEAKEDGIYVSMEGKKAPAEAQRYDAVLVAIGRVPNGKNLDAGKAGVEVDDRGFIRVDKQLRTNVPHIFAIGDIVGQPMLAHKGVHEGHVAAEVIAGKKHYFDPKVIPSIAYTEPEVAWVGLTEKEAKEKGISYETATFPWAASGRAIASDCADGMTKLIFDKESHRVIGGAIVGTNGGELLGEIGLAIEMGCDAEDIALTIHAHPTLHESVGLAAEIFEGSITDLPNPKAKKK

SEQ ID NO: 76044 - protein, 540 aa, Salmonella typhi
MTLPFKPHLIALVCSAGLFAASGVLYVKSRAPEAPAQAAAPTSEPTQTAVPAPVAKTTFTTAQIDQWVAPVALYPDALLSQVLMASTYPANVVQAVQWSRDNPTLQGDAAIQAVASQPWDPSVKSLVAFPQLMALMGENPQWVQNLGDAFLAQPQDVMDAVQRLRLLAQQTGSLKSTPQQTVTSVPKSSASTAVTTTTTTSASTPATPSTVIKIEPANPQVVYVPNYNPTTVYGAWPNTAYPPVYLPPPPGQQFADSFVKGFGYSLGVATTYALFSSIDWDDDDHHHHDDDHHDDDYHHGGNGYQHNGDNININVNNFNRISGQNLPGQTMGWQHNPAWRNGVPYPNNTVAQRFHPTNVSGGLSATQQAPVSRDSQRQAAMAQFQQRSHTSPANVSGETSRDRQRKAASQQLNQIAQRNNYRGYDGTQNSSRREAAQQTLNKSTTQQHRSELKAKAQQHPVSQQQRDTARQRIESSTPQQRQAFRQNMHANVFSGNDSRSPSWQSQQLRGLESRRGSHLNTEQRAAAREHFSEHHEFHRR

SEQ ID NO: 76045 - protein, 865 aa, Salmonella typhi
MLEEYRKHVAERAAQGIVPKPLDATQMAALVELLKTPPVGEEEFLLDLLINRVPPGVDEAAYVKAGFLAAVAKGDTTSPLVSPEKAIELLGTMQGGYNIHPLIDALDDAKLAPIAAKALSHTLLMFDNFYDVEEKAKAGNEYAKQVMQSWADAEWFLSRPPLAEKITVTVFKVTGETNTDDLSPAPDAWSRPDIPLHAQAMLKNAREGIEPDQPGVVGPIKQIEALQKKGYPLAYVGDVVGTGSSRKSATNSVLWFMGDDIPNVPNKRGGGLCLGGKIAPIFFNTMEDAGALPIEVDVSNLNMGDVIDVYPYKGEVRNHETDELLATFELKTDVLIDEVRAGGRIPLIIGRGLTTKAREALGLPHSDVFRQAKDVAESSRGFSLAQKMVGRACGVKGIRPGAYCEPKMTSVGSQDTTGPMTRDELKDLACLGFSADLVMQSFCHTAAYPKPVDVTTHHTLPDFIMNRGGVSLRPGDGVIHSWLNRMLLPDTVGTGGDSHTRFPIGISFPAGSGLVAFAAATGVMPLDMPESVLVRFKGKMQPGITLRDLVHAIPLYAIKQGLLTVEKKGKKNIFSGRILEIEGLPDLKVEQAFELTDASAERSAAGCTIKLNKEPIVEYLTSNIVLLKWMIAEGYGDRRTLERRIQGMEKWLADPQLLEADADAEYAAVIDIDLADIKEPILCAPNDPDDARLLSDVQGEKIDEVFIGSCMTNIGHFRAAGKLLDSHKGQLPTRLWVAPPTRMDAAQLTEEGYYSVFGKSGARIEIPGCSLCMGNQARVADGATVVSTSTRNFPNRLGTGANVFLASAELAAVAALIGKLPTPEEYQTFVAQVDKTAVDTYRYLNFDQLSQYTEKADGVIFQTAV

SEQ ID NO: 76046 - protein, 257 aa, Salmonella typhi
MSETFDPRCVWFVGAGPGDRELITLKGYRLLQQAQVVIYAGSLINTELLDYCPAQAERYDSAELHLEQIIELMAAGVKAGKTVVRLQTGDVSLYGSVREQGEELTRRGIDWQVVPGVSAFLGAAAELGVEYTVPEVSQSLIITRLEGRTPVPAREQLEAFASHQTSMAIYLSVQRIHRVAERLIAGGYPATTPVAVIYKATWPESQTVRGTLADISDKVRDAGIRKTALILVGNFLGKEYHYSRLYAADFSHEYRKA

SEQ ID NO: 76047 - protein, 325 aa, Salmonella typhi
MSETATWQPSASIPNLLKRAAIMAEIRRFFADRGVLEVETPCMSQATVTDIHLFPFETRFVGPGHSQGINLYLMTSPEYHMKRLLAAGCGPVFQLCRSFRNEEMGRHHNPEFTMLEWYRPHYDMYRLMNEVDDLLQQVLDCQPAESLSYQQAFLRHLEIDPLSADKTQLREAAAKLDLSNIADTEEDRDTLLQLLFTMGVEPHIGKEKPTFIYHFPASQASLAQISTEDHRVAERFEVYYKGIELANGFHELTDAREQQQRFEQDNRKRAARGLPQQPIDQNLLDALAAGLPDCSGVALGVDRLVMLALGAESLADVIAFTVDRA

SEQ ID NO: 76048 - protein, 211 aa, Salmonella typhi; identical to SEQ ID NO: 73496

SEQ ID NO: 76049 - protein, 500 aa, Salmonella typhi; identical to SEQ ID NO: 75263

SEQ ID NO: 76050 - protein, 309 aa, Salmonella typhi
MSIRIIPQDELGSSEKRTADMIPPLLFPRLKNVYNRRAERLRELAENNPLGDYLRFAALIAHAQEVVLYDHPLEMDLTARIKEANDQGKPPLDIHVLPRDKHWQKLLHSLIAELKPEMNGPALAVIENLEKASEQELEQMASALFASDFASVSSDKAPFIWAALSLYWAQMASLIPGKARAEYGEARQYCPVCGSMPVSSMVQIGTTQGLRYLHCNLCETEWHVVRVKCSNCEQSRDLHYWSLENEQAAVKAESCGDCGTYLKILYQEKDPKVEAVADDLASLVLDARMEQEGFARSSINPFLFPGEGE

SEQ ID NO: 76051 - protein, 125 aa, Salmonella typhi
MPDKAPRVASGVYCPMENVMNDSSRDPIITEDEIRALNFTPEDILEIEKVILSSVHVARRKVAMVVGMTIGTLRDRDEDKWKHVSDIYCAYVVRCLVFRGELVGYGDLFRMRYSEINLPVADLDA

SEQ ID NO: 76052 - protein, 304 aa, Salmonella typhi
MISASALNSELINKIAQDFAQATTGLAVVVVNIHGDEISELFNFTPFCQLMRQHPQHSTRCRMSDRCGGLEASKSDQPCIYRCHAGLTDFSIPLVIAGHLVGFVLCGQVRLSNDVELVNILNVDDRWQADPELLNEFRNVPEMDYSRVIASADLLKLIVENCLKKQLNFVVIKDNPQQSEANKTTRGPTPHDSKMKKALRYIDAHLSDDLRLEDVASHVYLSPYYFSKLFKKYQGIGFNAWVNRQRMVSARELLCHSDWSIASIARNLGFSQTSYFCKVFRQTYQVTPQAYRQQINENSHPPSI

SEQ ID NO: 76053 - protein, 855 aa, Salmonella typhi; identical to SEQ ID NO: 75313

SEQ ID NO: 76054 - protein, 292 aa, Salmonella typhi
MNNYTIKDITRASGGFAMLAVDQREAMRLMFAAAGAKTPVADSVLTDFKVNAAKILSPYASAVLLDQQFCYRQAVEQNAVAKSCAMIVAADDFIPGNGIPVDNVVIDKKINAQAVKRDGAKALKLLVLWRSDEDAQQRLDMVKEFNELCHSNGLLSIIEPVVRPPRCGDKFDREQAIIDAAKELGDSGADLYKVEMPLYGKGARSDLLTASQRLNGHINMPWVILSSGVDEKLFPRAVRVAMEAGASGFLAGRAVWSSVIGLPDTELMLRDVSAPKLQRLGEIVDEMMAKRR

SEQ ID NO: 76055 - protein, 264 aa, Salmonella typhi
MSKPTTIAVLQKCKQEKKRFATITAYDYSFAKLFADEGINVMLVGDSLGMTIQGHDSTLPVTVEDIAYHTRAVRRGAPNCLLLSDLPFMAYATPEQAFENAAIVMRAGANMVKIEGGAWLVDTVKMLTERAVPVCGHLGLTPQSVNIFGGYKIQGRGDAGQILLDDALALEAAGAQLLVLECVPVELAKRVTEALSIPVIGIGAGNVTDGQILVMHDAFGITGGHIPKFAKNFLAEAGDMRAAVRQYMAEVESGVYPGEEHSFH

SEQ ID NO: 76056 - protein, 391 aa, Salmonella typhi
MLLKNTTWFAAFFLMMAIMSNCYAINTTLAVGDYASSEHDGPSGDSVFTDNSHNFGQTIAIHKETALRQITVFNWSGIQYVMEMFCNGSGNHTYLQLTHNYISAGKSYNGHPLYKTSIPGFYFTIEMTFLQPAENMTSSTFWFDKTSTPITSEFTEFPSACSRTNVYSNLGKLMYGLKIYAYVDSDFAPTEAQLQSFTLSKNGDSDFYIDNPGSGLSNYKMKFNLAATGLKAVWPTCSASTISGTNVSGSTVKLGSFYPKQIMEGLSPTKFQINLSSCQYINNIEVKLASNNVGTKNTSLLTNNSTSNTKASGIGVLIEGLKSSSSAQMVLKPNDSSSIYKDTTNNTGDGSPVGSATKSLYFQATLKPDGDNPTINPGDFKATAQFSITYP

SEQ ID NO: 76057 - protein, 134 aa, Salmonella typhi
MELRNTAFHLLRQLFQQHTARWQHELPELTKPQYAVMRVIAEHPGIEQVDLTEAAVSTKATLAEMLSRMENRGLVKRENDPLDKRRRFVYLTVQGQTLLAAAIPLGDRVDDEFLGRLSAEEREQFTQLVRKMMT

SEQ ID NO: 76058 - protein, 250 aa, Salmonella typhi
MRMAAMHSGGKTIQLNAGHYQAKIVTVGAGLAELTHHGRHVVIPHKPEEIPMAHLGKVLIPWPNRVTNGCYSYNGKVFQLAVNDPVSQTAIHGLLAWRDWQINYQSATEASLTIFLPPSYGYPFALISEVIYRLDAASGLHVLIRTQNIGDESAPYGAGAHPYLTCNLQSIDSCVLTLPASEELPAGRNFSASCLLGETRLDHAVKTATAPAEWEVRLTSPTQNMSTFLRSKQPWLQIYTGEKLSRKVSR

SEQ ID NO: 76059 - protein, 607 aa, Salmonella typhi
MIENLRNIAIIAHVDHGKTTLVDKLLQQSGTFDARAETQERVMDSNDLEKERGITILAKNTAIKWNDYRINIVDTPGHADFGGEVERVMSMVDSVLLVVDAFDGPMPQTRFVTKKAFAHGLKPIVVINKVDRPGARPDWVVDQVFDLFVNLDATDEQLDFPIIYASALNGIAGLDHEDMAEDMTPLYQAIVDHVPAPDVDLDGPLQMQISQLDYNNYVGVIGIGRIKRGKVKPNQQVTIIDSEGKTRNAKVGKVLTHLGLERIDSDIAEAGDIIAITGLGELNISDTICDPQNVEALPALSVDEPTVSMFFCVNTSPFCGKEGKFVTSRQILDRLNKELVHNVALRVEETEDADAFRVSGRGELHLSVLIENMRREGFELAVSRPKVIFREIDGRKQEPYENVTLDVEEQHQGSVMQALGERKGDLKNMNPDGKGRVRLDYVIPSRGLIGFRSEFMTMTSGTGLLYSTFSHYDDIRPGEVGQRQNGVLISNGQGKAVAFALFGLQDRGKLFLGHGAEVYEGQIIGIHSRSNDLTVNCLTGKKLTNMRASGTDEAVILVPPIKMSLEQALEFIDDDELVEVTPTSIRIRKRHLTENDRRRANRGQKEE

SEQ ID NO: 76060 - protein, 469 aa, Salmonella typhi
MSAEHVLTMLNEHEVKFVDLRFTDTKGKEQHVTIPAHQVNAEFFEEGKMFDGSSIGGWKGINESDMVLMPDASTAVIDPFFADSTLIIRCDILEPGTLQGYDRDPRSIAKRAEDYLRATGIADTVLFGPEPEFFLFDDIRFGASISGSHVAIDDIEGAWNSSTKYEGGNKGHRPGVKGGYFPVPPVDSAQDIRSEMCLVMEQMGLVVEAHHHEVATAGQNEVATRFNTMTKKADEIQIYKYVVHNVAHRFGKTATFMPKPMFGDNGSGMHCHMSLAKNGTNLFSGDKYAGLSEQALYYIGGVIKHAKAINALANPTTNSYKRLVPGYEAPVMLAYSARNRSASIRIPVVASPKARRIEVRFPDPAANPYLCFAALLMAGLDGIKNKIHPGEAMDKNLYDLPPEEAKEIPQVAGSLEEALNALDLDREFLKAGGVFTDEAIDAYIALRREEDDRVRMTPHPVEFELYYSV

SEQ ID NO: 76061 - protein, 349 aa, Salmonella typhi
MASGIQPDAGQILNSLINSVLVVDDALAIHYANPAAQQLLAQSSRKLFGTPLPELLSYFSLNIDLMRESLAAGQGFTDNEVTLVIDSRSHILSLTAQRLPDDFILLEMAPMDNQRRLSQEQLQHAQQIAARDLVRGLAHEIKNPLGGLRGAAQLLSKALPDPALTEYTKVIIEQADRLRNLVDRLLGPQHPGMHITESIHKVAERVVALVSMELPDNVRLIRDYDPSLPELPHDPEQIEQVLLNIVRNALQALGPEGGEITLRTRTAFQLTLHGERYRLAARIDVEDNGPGIPPHLQDTLFYPMVSGREGGTGLGLSIARNLIDQHAGKIEFTSWPGHTEFSVYLPIRK

SEQ ID NO: 76062 - protein, 198 aa, Salmonella typhi
MVIPMRRLREPTLATLFSGLATALFSATLYADTNVNFTASVQKDTCQIKIDGNGTVNFATIAPAYFADGITAETDYEGGKEFTIKLISCPISDGKITNVTFNFAPLNGQFSPENQQVFPNDIATDAGGVDNVGVVIFTTDSPRTNVLNTDGSSRATFAASTYSDTVWTFYSRMQKIRSAEKVTTGELSSRVLVNVSYE

SEQ ID NO: 76063 - protein, 863 aa, Salmonella typhi
MLAVCCALFYSQSSISAESVEYDSSFLMGSSASTIDISKYSDGNPTPVGTYSVKVFVNENPVSSLSIPFIDIGKVSAEACLTQKNLAQLHIKQPEINATNQILKKGEEEDQDCLNLPVAIAHSEVNFDMGEQRLDITVPQAWLIEGYDGYVEPSLWEDGIPAALLSYSANGYHSTNGSADNDSMYAAFNTGINLGAWRFRANGNYNWTKDSGSSFDYQNRYLQRDLPSMRSQLVVGETYTTGETFDSVSIRGARLYSDNRMLPSQLANYAPIIRGVANSNTKVSITQGGYKIYESTVPPGPFEISDISPSGYGSDLIVTVEEADGSKRTFSQPFSSVMQMQRPGVGRWDFSAGEVNDDELHDKPYMAQGSYYYGLNNFLTLYTGVQGTDNNYLAGLLGVGLNTPLGAFALDVTQSRTEIPEDKTYKGQSYRLTWNKLIEPTATSFNVAAYRYSTQDYLGLNDALQLIDDAKHKDADDRNTMLNYSRMKNQVTVSINQPLRFKEVDYGSFFLSGSWTDYWATNESRTDYSLGYGRGFSWGSLSINLQRSWDEDGEKDDSLYINFNVPLENLLGGGRRKSGFSSLTAQMRTDFDGGYQLSMNSNGSSEDHTLNYSVNTGYTMQKNEKNITDVSGYASYQSPWGDVTASASANNDSSRQYSLATTGDFVLHGGGVTFTNDNFGNSDAIVLVKAPGAKGARINGGNSTIDRWGYGATNSLSAYRENQVNIDIDTLENDVELKSTSTTLIPRDGAVVLASFETDQGRSVILNMSRNDGKALPFGAEVYENDVQIDNMGQGGQAFVRGISDAGELSVRWFEENQPATCLATFALPATQQTVGSSQTLLLDHITCRVNNLKSNGIDNEKE

SEQ ID NO: 76064 - protein, 244 aa, Salmonella typhi
MLYVKKSLTAIVLASAVFSTFSYADIIISGTRIVYDENKKDVSIRLENKGTRPLLVQNWIDLGNDNDDPGSIKAPFVSTPPVSRVEPKRGQSVKIMYTQASALPKDRESVFWFNVLEVPPKADTSKEENKSLLQLAFRTRIKLFYRPTGLKGQPAEAAKQLKWQIASEQGYAVLRADNSTPYFVSFNDATYTAGGKRYDVEATMVAPFSKSSFTVKGLSGASAGKLEYHAINDFGGLIEGSVSL

SEQ ID NO: 76065 - protein, 159 aa, Salmonella typhi
MTIAYIALGSNLASPLEQVNAALKAIADIPDSRIVAVSSFYRTPPLGPQDQPDYLNAAVALDTALAPEELLNHTQRIELQQGRVRKAERWGPRTLDLDIMLFGDEVINTDRLTVPHYDMKNRGFMLWPLFEIAPELVFPDDKGLLIELMSQMSPCPDRW

SEQ ID NO: 76066 - protein, 472 aa, Salmonella typhi
MTLPRCAIFTRVANFCRKVLSREESEAEQAVARPHMTIIPREQHAISRKDISENALKVLYRLNKAGYEAYLVGGGVRDLLLGKKPKDFDVTTNATPDQVRKLFRNCRLVGRRFRLAHVMFGPEIIEVATFRGHNEGSESDRTTSQRGQNGMLLRDNIFGSIEEDAQRRDFTINSLYYSVADFTVRDYVGGMQDLQEGVIRLIGNPETRYREDPVRMLRAVRFAAKLNMRISPETAEPIPRLATLLNDIPPARLFEESLKLLQAGNGFETYQQLREYHLFQPLFPTITRYFTENGDSAMERIIAQVLKNTDNRIRNEMRVNPAFLFAAMFWYPLLEMAQKIAQESGLAYYDAFALAMNDVLDEACRSLAIPKRLTTLTRDIWQLQLRMSRRQGKRAWKLMEHPKFRAAFDLLELRAQVENNTELQRLAQWWAEFQASAPPEQKGMLNELDDDPAPRRRRSRPRKRAPRREGTV

SEQ ID NO: 76067 - protein, 159 aa, Salmonella typhi
MRIGHGFDVHAFGGEGPIIIGGVRIPYEKGLLAHSDGDVALHALTDALLGAAALGDIGKLFPDTDPAFKGADSRELLREAWRRIQAKGYTLGNVDVTIIAQAPKMLPHIPQMRVFIAEDLGCHMDDVNVKATTTEKLGFTGRGEGIACEAVALLMKAAK

SEQ ID NO: 76068 - protein, 236 aa, Salmonella typhi
MAATLLDVCAVVPAAGFGRRMQTECPKQYLSIGNKTILEHSVHALLAHPRVTRVVIAISPGDHRFAQLPLANHPQITVVDGGNERADSVLAGLQAVAKAQWVLVHDAARPCLHQDDLARLLAISENSRVGGILASPVRDTMKRGEPGKNAIAHTVERADLWHALTPQFFPRELLHDCLTRALNEGATITDEASALEYCGFHPALVEGRADNIKVTRPEDLALAEFYLTRTIHQEKA

SEQ ID NO: 76069 - protein, 201 aa, Salmonella typhi
MALHDENVVWHSHPVTVAAREQLHGHRGVVLWFTGLSGSGKSTVAGALEEALHQRGVSTYLLDGDNVRHGLCRDLGFSDADRQENIRRVGEVASLMADAGLIVLTAFISPHRAERQLVKERVGHDRFIEIYVNTPLAICEQRDPKGLYKKARAGELRNFTGIDAIYEAPDSPQVHLNGEQLVTNLVSQLLDLLRRRDIIRS

SEQ ID NO: 76070 - protein, 928 aa, Salmonella typhi
MVQIPENPLILVDGSSYLYRAYHAFPPLTNSAGEPTGAMYGVLNMLRSLIMQYQPTHAAVVFDAKGKTFRDELFEHYKSHRPPMPDDLRAQIEPLHAIVKAMGLPLLAVSGVEADDVIGTLAREAEKVGRPVLISTGDKDMAQLVTQNITLINTMTNTILGPDEVVNKYGVPPELIIDFLALMGDSSDNIPGVPGVGEKTAQALLQGLGGLDTLYAEPEKIAGLTFRGAKTMAGKLAQNKDVAYLSYKLATIKTDVELELTCEQLEVQQPIADELLGLFKKYEFKRWTADVEAGKWLQAKGAKPAAKPQETVVIDESPSEPAAALSYENYVTILDDVTLESWIEKLKKAPVFAFDTETDSLDNIAANLVGLSFAIEPGVAAYVPVAHDYLDAPDQISRQRALELLKPLLEDEKVRKVGQNLKYDRGVLQNYGIELRGIAFDTMLESYILNSVAGRHDMDSLSDRWLKHKTITFEDIAGKGKNQLTFNQIALEEAGRYAAEDADVTLQLHLKMWPELQQHKGPLNVFENIEMPLVPVLSRVERNGVKIDPAVLHKHSEEITLRLAELEKKAHDIAGEAFNLSSTKQLQTILFEKQGIKPLKKTPGGAPSTSEEVLEELALDYPLPKVILEYRGLAKLKSTYTDKLPLMINPKTGRVHTSYHQAVTATGRLSSTDPNLQNIPVRNEEGRRIRQAFIAPEDYLIVSADYSQIELRIMAHLSRDKGLLTAFAEGKDIHRATAAEVFGLPLDSVTGEQRRSAKAINFGLIYGMSAFGLSRQLNIPRKEAQKYMDLYFERYPGVLEYMERTRAQAKEQGYVETLEGRRLYLPDIKSSNAARRAGAERAAINAPMQGTAADIIKRAMIAVDAWLQAEQPRVRMIMQVHDELVFEVHKDDLDAVAKRIHQLMENCTRIDVPLLVEVGSGENWDQAH

SEQ ID NO: 76071 - protein, 328 aa, Salmonella typhi; identical to SEQ ID NO: 73486

SEQ ID NO: 76072 - protein, 298 aa, Salmonella typhi
MTDSHYIGRFAPSPSGELHFGSLIAALGSYLQARAQRGVWRVRIEDIDPPREVPGAAATILRQLEHYGLHWDGEVLWQSQRHEAYREALAWLHEQGLSYYCTCPRSRIQRLGGIYDGHCRTLCHGPENAAVRIKQQHPVMHFHDALRGDIQADPQLASEDFIIHRRDGLFAYNLAVVVDDHFQGVTEIVRGADLIEPTVRQLSLYKQFGWRAPGYVHLPLALNEQGAKLSKQNHAPALATGDPRPVLVQALRFLGQRDVVAWQEMSVEELLRFAVAHWRLTAVPTSANVNPAFSNASR

SEQ ID NO: 76073 - protein, 151 aa, Salmonella typhi; identical to SEQ ID NO: 55735

SEQ ID NO: 76074 - protein, 813 aa, Salmonella typhi
MEPFVTSLPVAAVLPELLTALKTAPQVLLSAPTGAGKSTWLPLQLLQQGPVAGKILLLEPRRLAARNVAQRLAEALNEKPGETVGYRMRAQSCVGPRTRLEVVTEGVLTRMIQRDPELRGVGLVILDEFHERSLQADLALALLLDIQQGLRDDLRLLIMSATLDNDRLCQRLPDAPTIVSEGRAFPVERRYQPLAAHLRFDEAVAMATAELLRNENGSLLLFLPGVGEIQRVHEHLASRVGSDVLLCPLYGALSLEAQRKAIVPAPAGMRKVVLATNIAETSLTIEGIRLVVDSAQERVARFDARTGLTRLVTQRISQASMTQRAGRAGRLAPGICLHLLAKEQAERAAAQSDPEILHSDLSGLLMEVLQWGCHDPASLFWLDRPPEVNLQAARRLLLMLGALEGERLSARGRKMAATGNDPRLAAMLVNADEGDSAATAAMLAAILEDPPRGGGTDLSVLFSRRQPGWQQRSQQLLKRLQVRNGEPDSALIMPLLARAFSDRIARRRGQEGRYQLANGMGAMLDADDALGRHEWLIAPLLLQGSASPDARILLAQPLDIASLIQACPDLLRQSDTVEWDEAQGTLKAWRRMRIGQLTVSVQPLAKPSEEELHQAMLNGIRDKGLSVLNWTPEAEQFRLRLHCAAKWLPEYDWPAVDEASLLATLENWLLPHMTGVQSLRSLKSLNVTQALRGLLDYAMLQRLDSELPGHYTVPTGSRITIRYHEDNPPALAVRMQEMFGEASTPTLAQGRVPLVLELLSPAQRPLQITRDLSAFWQGAYREVQKEMKGRYPKHVWPDDPANTAPTRRTKKYS

SEQ ID NO: 76075 - protein, 840 aa, Salmonella typhi
MAGNDREPIGRKGKPSRPVKQKVSRRRQHDDDYDDDYEDEEPMPRKGKGKGRKPRGKRGWLWLLLKLFIVFVVLFAIYGVYLDQKIRSRIDGKVWQLPAAVYGRMVNLEPDMPVSKNEMVKLLEATQYRLVTKMTRPGEFTVQANSIEMIRRPFDFPDSKEGQVRARLTFSDGRLETIVNLDNNRQFGFFRLDPRLITMLSSPNGEQRLFVPRSGFPDLLVDTLLATEDRRFYEHDGISLYSIGRAVLANLTAGRTVQGASTLTQQLVKNLFLSSERSYWRKANEAYMALIMDARYSKDRILELYMNEVYLGQSGDNEIRGFPLASLYYFGRPVEELSLDQQALLVGMVKGASIYNPWRNPKLALERRNLVLRLLQQQKIIDQELYDMLSARPLGVQPRGGVISPQPAFMQMVRQELQAKLGDKIKDLSGVKIFTTFDSVAQDAAEKAVVEGIPALKKQRKLSDLETAMVVVDRFSGEVRAMVGGAEPQYAGYNRAMQARRSIGSLAKPATYLTALSQPNLYRLNTWIADAPISLRQPNGQVWSPENDDRRYSESGKVMLVDALTRSMNVPTVNLGMALGLPAVTDTWTKLGVPKDQLNPVPAMLLGALNLTPIEVAQAFQTIASGGNRAPLSALRSVIAEDGKVLYQSYPQAERAVPAQAAYLTLWTMQQVVQRGTGRQLGAKYPGLHLVGKTGTTNNNVDTWFAGIDGSQVTITWVGRDNNQPTKLYGASGAMAIYQRYLANQTPTPLVLTPPEDVVDMGVDYDGNFVCNGGMRTLPVWTDDPNTLCQQGEMMQQQQQPSGNPFDQSSQPQQPAQQQPPKEEKSDGVAGWIKEMFGGN

SEQ ID NO: 76076 - protein, 265 aa, Salmonella typhi
MQENHIHSDTTFALRSVAFRVPGRTLLHPLSLTFPAGRVTGLIGHNGSGKSTLLKMLGRHQLPSEGDILLDNQPLASWSSKAFARKVAYLPQQLPQAEGMTVRELVAIGRYPWHGALGRFGVADREKVDEAITLVGLKPLAHRLVDSLSGGERQRAWIAMLVAQDSRCLLLDEPTSALDIAHQVDVLALVHRLSQQRGLTVVAVLHDINMAARYCDYLVALRGGEMIAQGTPAELMRSDTLEQIYGIPMGILPHPAGAAPVSFVY

SEQ ID NO: 76077 - protein, 476 aa, Salmonella typhi
MTVKNDSIQSTFLFHDYETFGTHPALDRPAQFAALRTDNDFNVIGEPEVFYCKPADDYLPQPGAVLITGITPQEAREKGENEAAFARRIHALFTVPKTCVVGYNNVRFDDEVTRNIFYRNFYDPYAWSWQHDNSRWDLLDVMRACYALRPEGINWPENDDGLPSFRLEHLTQANGIEHSNAHDAMADVYATIAMAQLVKTRQPRLFDYLYSHRSKHKLAALIDVPQMKPLVHVSGMFGAWRGNTSWVAPLAWHPENRNAVIMVDLAGDISPLLELDSDTLRERLYTAKADLGDHAAVPVKLVHINKCPVLAQANTLRPEDADRLGINRQHCLDNLKVLRENPQVRDKVVAIFAEAEPFATSDNVDAQLYDGFFSDADRAAMKIVLETEPRNLPALDITFVDKRIEKLLFNYRARNFPGTLDDAEQQRWLEHRRQVLTPEFLQQYANELQMLSQQYAEDKTKLGLLKSLWQYATEIV

SEQ ID NO: 76078 - protein, 299 aa, Salmonella typhi
MLDNTRLRIAIQKSGRLSDDSRELLARCGIKINLHTQRLIAMAENMPIDILRVRDDDIPGLVMDGVVDLGIIGENVLEEELLNRRAQGEDPRYLTLRRLDFGGCRLSLATPVDEAWDGPAALDGKRIATSYPHLLKRYLDQKGVSFKSCLLNGSVEVAPRAGLADAICDLVSTGATLEANGLREVEVIYRSKACLIQRDGEMAQSKQQLIDKLLTRIQGVIQARESKYIMMHAPSERLEEVIALLPGAERPTILPLAGEQQRVAMHMVSSETLFWETMEKLKALGASSILVLPIEKMME

SEQ ID NO: 76079 - protein, 296 aa, Salmonella typhi
MRELYPLTRRRLLTAMALSPLLWQMNTAQAAAIDPRRIVALEWLPVELLLALGITPYGVADVPNYKLWVSEPPLPDSVIDVGLRTEPNLELLTEMKPSFMVWSAGYGPSPEKLARIAPGRGFDFSDGKKPLAVARRSLVELAQTLNLEAAAEKHLAQYDRFIASQKPRFIRRGGRPLLMTTLIDPRHMLVLGPNCLFQEVLDEYGIVNAWQGETNFWGSTAVSIDRLAMYKEADVICFDHGNSTDMNALMATPLWQAMSFVRAGRFHRVPAVWFYGATLSTMHFVRILNNVLGGKA

SEQ ID NO: 76080 - protein, 685 aa, Salmonella typhi
MSRKREIPDGGAKNALTDLRFGRFVGRIRRSRHPALLLLALLVAACWLTWVNFSVALPRSQWQQAIWSPDIDIIEQMIFHYSQLPRLAISLLVGAGLGLVGVLFQQVLRNPLAEPTTLGVATGAQLGITVTTLWAIPGALTTQFAALTGACIVGALVFGVAWGKRLSPVTLILAGLVVSLYCGAINQLLVIFHHDQLQSMFLWSTGTLTQTDWSGVQRLWPQLLGGVMLTLLLLRPMTLMGLDDGVARNLGLALSLARLAALSLAIVLSALLVNAVGIIGFIGLFAPLLAKMLGARRLLARLMLAPLIGALILWLSDQIILWLTRVWMEVSTGSVTALIGAPLLLWLLPRLKSMSAPDMNASDRVAAERRHVLTFAVAGGALLLLATWVALSFGRDAHGWTWASGTLLEELMPWRWPRILAALMAGVMLAVAGCIIQRLTGNPMASPEVLGISSGAAFGVVLMLFLVPGNAFGWLLPAGSLGAAATLLIIMIAAGRGGFSPQRMLLAGMALSTAFTMLLMMLQASGDPRMADVLTWISGSTYNATGGQVTRTAIVMVILLAVVPLCRRWLTILPLGGDAARAVGIALTPSRIALLALAACLTATATMTIGPLSFVGLMAPHIARMLGFRRTMPHMVISALAGGVLLVFADWCGRMALFPYQIPAGLLSSFIGAPYFIYLLRKQSR

SEQ ID NO: 76081 - protein, 266 aa, Salmonella typhi
MAKQMFRALGALLLTLPVWLYAAPRVITLSPANTELAFAAEITPVGVSSYSDYPPEAQKIEQVSTWQGMNLERIVALKPDLVVAWRGGNAERQVNQLTSLGIKVMWVDAVTIEQIADALRQLAAWSPQPEKAQQAAQTLLKEYAALKVEYAGKAKKRVFLQFGMNPLFTSGKGSIQHQVLTTCGGENVFADSRVPWPQVSREQVLARHPQAIIVAGKAGEILKIEQYWGNLLKIPVIPLNSDWFERASPRIILAAKQLCNALSQVN

SEQ ID NO: 76082 - protein, 232 aa, Salmonella typhi
MKIGIIGAMEEEVTLLRDKIDNRQTITLGGCEIYTGQLNGTEVALLKSGIGKVAAALGATLLLEHCKPDVIINTGSAGGLASTLKVGDIVVSDEARYHDADVTAFGYEYGQLPGCPAGFKADDKLIAAAESCIRELNLNAVRGLIVSGDAFINGSVGLAKIRHNFPDAVAVEMEATAIAHVCHNFNVPFVVVRAISDVADQQSHLSFDEFLAVAAKQSTLMVETLVQKLAHG

SEQ ID NO: 76083 - protein, 120 aa, Salmonella typhi; identical to SEQ ID NO: 75348

SEQ ID NO: 76084 - protein, 265 aa, Salmonella typhi
MALRIRVLLENHKGAGTDKSLKARPGLSLLVEDESTSILFDTGPDGSFMQNASAMGIDLSDVSAVVLSHGHYDHCGGVPWLPDNSRIICHPNIARERYAAITFLGITRKIKKLSCEVDYSRYRMMYTCGPLPIGENFIWSGEIPVVAPEAYGIFGGHDAEPDSILDEGVLIYQSTKGLVIIMGCGHRGIANIVRHCQNITGIKRIYALIGGFHLRCASPFTLWRVRRFLQEQKPEKLCGCHCTGAWGRLWLPEITAPATGDVLRF

SEQ ID NO: 76085 - protein, 327 aa, Salmonella typhi
MTVDSNASSGRGNDPEQIDLIELLLQLWRGKMTIIVAVIIAILLAVGYLMIAKEKWTSTAIITQPDAAQVATYTNALNVLYGGNAPKISEVQANFISRFSSAFSALSEALDNQKEREKLTIEQSVKGQTLPLSVSYVSTTAEGAQRRLAEYIQQVDEEVAKELEVDLKDNITLQTKTLQESLETQEVVAQEQKDLRIKQIEEALRYADEAKITQPQIQQTQDVTQDTMFLLGSDALKSMIQNEATRPLVFSPAYYQTKQTLLDIKNLKVTADTVHVYRYVMKPTLPVRRDSPKTAITLVLAVLLGGMIGAGIVLGRNALRSYKPKAL

SEQ ID NO: 76086 - protein, 388 aa, Salmonella typhi
MKITISGTGYVGLSNGLLIAQHHDVVALDIVPARVELLNDRISPIVDKEIQQFLKEDNIRFRATLDKFDAYQNADYVIIATPTDYDPKTNYFNTFSVESVIQDVISINPAAVMIIKSTVPVGFTAAMRQKFATENIIFSPEFLREGKALYDNLYPSRIVIGEQSERAREFAALLQEGAIKQEIPTLFTDSTEAEAIKLFANTYLAMRVAYFNELDSYAETLGLNTRQIIEGVCLDPRIGNHYNNPSFGYGGYCLPKDTKQLLANYQSVPNNIISAIVEANRTRKDFIADSILARKPKVVGIYRLIMKSGSDNFRASSIQGIMKRIKAKGVEVIIYEPVMQEETFFNSRLERDLHCFKQQADVIISNRMAAELLDVAEKVYTRDLFGSD

SEQ ID NO: 76087 - protein, 432 aa, Salmonella typhi
MSKIVKVIGREIIDSRGNPTVEAEVHLEGGFVGMAAAPSGASTGSREALELRDGDKSRFLGKGVTKAVGAVNGPIAQAILGKDAKDQAGIDKIMIDLDGTENKSNFGANAILAVSLANAKAAAAAKGMPLYEHIAELNGTPGKYSMPVPMMNIINGGEHADNNVDIQEFMIQPVGAKTVKEAIRMGSEVFHHLAKVLKGKGMNTAVGDEGGYAPNLGSNAEALAVIAEAVKAAGYELGKDITLAMDCAASEFYKDGKYVLAGEGNKAFTSEEFTHFLEELTKQYPIVSIEDGLDESDWDGFAYQTKVLGDKIQLVGDDLFVTNTKILKEGIEKGIANSILIKFNQIGSLTETLAAIKMAKDAGYTAVISHRSGETEDATIADLAVGTAAGQIKTGSMSRSDRVAKYNQLIRIEEALGEKAPYNGRKEIKGQA

SEQ ID NO: 76088 - protein, 468 aa, Salmonella typhi
MSKQQIGVVGMAVMGRNLALNIESRGYTVSVFNRSREKTEEVIAENPGKKLVPYYTVKEFVESLETPRRILLMVKAGAGTDAAIDSLKPYLEKGDIIIDGGNTFFQDTIRRNRELSAEGFNFIGTGVSGGEEGALKGPSIMPGGQKDAYELVAPILTKIAAVAEDGEPCVTYIGADGAGHYVKMVHNGIEYGDMQLIAEAYSLLKGGLNLSNEELANTFTEWNNGELSSYLIDITKDIFTKKDEDGNYLIDVILDEAANKGTGKWTSQSALDLGEPLSLITESVFARYISSLKAQRVAASKVLSGPKAQPAGDKAEFIEKVRRALYLGKIVSYAQGFSQLRAASDEYHWELNYGEIAKIFRAGCIIRAQFLQKITDAYAENAGIANLLLAPYFKKIADEYQQALRDVVAYAVQNGIPVPTFSAAVAYYDSYRAAVLPANLIQAQRDYFGAHTYKRTDKEGIFHTEWLE

SEQ ID NO: 76089 - protein, 545 aa, Salmonella typhi
MTTNYIFVTGGVVSSLGKGIAAASLAAILEARGLNVTIMKLDPYINVDPGTMSPIQHGEVFVTEDGAETDLDLGHYERFIRTKMSRRNNFTTGRIYSDVLRKERRGDYLGATVQVIPHITNAIKERVLEGGEGHDVVLVEIGGTVGDIESLPFLEAIRQLAVDIGREHALFMHLTLVPYLAAAGEVKTKPTQHSVKELLSIGIQPDILICRSDRAVPANERAKIALFCNVPEKAVISMKDVDSIYKIPGLLKSQGLDDYICKRFSLNCPEANLSEWEQVIYEEANPAGEVTIGMVGKYIELPDAYKSVIEALKHGGLKNRVTVNIKLIDSQDVETRGVEILKDLDAILIPGGFGYRGVEGKIATARYARENNIPYLGICLGMQVALIEFARNVAGMDNANSTEFVPDCKYPVVALITEWRDEDGNVEVRSEKSDLGGTMRLGAQQCQLSDDSLVRQLYGASTIVERHRHRYEVNNMLLKQIEAAGLRVAGRSGDDQLVEIIEVPNHPWFVACQFHPEFTSTPRDGHPLFAGFVKAANEHQKRQAK

SEQ ID NO: 76090 - protein, 266 aa, Salmonella typhi
MTTNHQIDRLLTLMQRLRDPENGCPWDKEQTFASIAPYTLEETYEVLDAIAREDFDDLRGELGDLLFQVVFYAQMAQEEGRFDFNDICAAISDKLERRHPHVFGELSADNSEEALVRWEQIKTEERAQKAQHSALDDIPRSLPALMRAQKIQKRCSNVGFDWTTLGPVVDKVYEEIDEVMFEARQAVVDQAKLEEEMGDLLFATVNMARHLGTKAEIALQKANDKFERRFREVERIVAARGLEMTGVDLETMEEVWQEVKRQEIDL

SEQ ID NO: 76091 - protein, 899 aa, Salmonella typhi
MMNNTWKSVLCPIACGVGMLLSASPYSASGKDIEFNTDFLDVKNRDNVNIAQFSRKGFILPGVYLLQIKINGQTLPQEFPVNWVIPEHDPQGSEVCAEPELVTQLGIKPELAEKLVWITHGERQCLAPDSLKGMDFQADLGHSTLLVNLPQAYMEYSDVDWDPPARWDNGIPGIILDYNINNQLRHDQESGSEEQSISGNGTLGANLGAWRLRADWQASYDHRDDDESTSTLHDQSWSRYYAYRALPTLGAKLTLGESYLQSDVFDSFNYIGASVVSDDQMLPPKLRGYAPEIVGIARSNAKVKVSWQGRVLYETQVPAGPFRIQDLNQSVSGTLHVTVEEQNGQTQEFDVNTASVPFLTRPGMVRYKMALGRPQDWDHHPITGTFASAEASWGVTNGWSLYGGAIGESNYQAVALGSGKDLGVVGAVAVDITHSIAHMPQDDGFDGETLQGNSYRISYSRDFDEIDSRLTFAGYRFSEKNFMSMSDYLDAKTYHHLNAGHEKERYTVTYNQNFREQGMSAYFSYSRSTFWDSPDQSNYNLSLSWYFDLGSIKNLSASLNGYRSEYNGDKDDGVYISLSVPWGNDSISYNGTFNGSQHRNQLGYSGHSQNGDNWQLHVGQDEQSAQADGYYSHQGALTDIDLSADYEEGSYRSLSMSLRGGMTLTTQGGALHRGSLAGSTRLLVDTDGIADVPVSGNGSPTSTNIFGKAVIADVGSYSRSLARIDLNKLPEKAEATKSVVQITLTEGAIGYRHFDVVSGEKMMAVFRLADGDFPPFGAEVKNERQQQLGLVADDGNAWLAGVKAGETLKVFWDGAAQCEASLPPTFTPELLANALLLPCKMLEGQPPTAPQKSSPLPAQPLIQEHTQTDGQPAAPVATTTQTPPIPLADNHAVNRKDME

SEQ ID NO: 76092 - protein, 257 aa, Salmonella typhi
MNKTNHFNRQALIATVLLAAPLVSHSAIVPDRTRVIFNGNENSITVTLKNGNATLPYLAQAWLEDDKFAKDTRYFTALPPLQRIEPKSDGQVKVQPLPAAAGLPQDRESLFYFNVREIPPKSDKPNTLQLALQTRIKFFYRPVAVARQVDKTHPWQTKLTLTYQGDGVIFDNPTPFYLVISNAGSKENETASGFKNLLIAPREKVTSPIKGASLGSSPVVGYVDDYGGHRLLVFTCSGNTCKVNEEKTRDAEKKANK

SEQ ID NO: 76093 - protein, 744 aa, Salmonella typhi
MVAVRSAHINKAGEFDPKKWIASLGISSQQSCERLAETWAYCLQQTQGHPDADLLLWRGVEMVEILSTLSMDIDTLRAALLFPLADANVVSEDVLRESVGKSIVTLIHGVRDMAAIRQLNATHNDSVSSEQVDNVRRMLLAMVDDFRCVVIKLAERIAHLREVKEAPEDERVLAAKECTNIYAPLANRLGIGQLKWELEDYCFRYLHPAEYKRIAKLLHERRLDREHYIEEFVGHLRAEMKNEGVQAEVYGRPKHIYSIWRKMQKKHLAFDELFDVRAVRIVAERLQDCYAALGIVHTHYRHLPDEFDDYVANPKPNGYQSIHTVVLGPGGKTVEIQIRTKQMHEDAELGVAAHWKYKEGAASGGVRSGHEDRIAWLRKLIAWQEEMADSGEMLDEVRSQVFDDRVYVFTPKGDVVDLPAGSTPLDFAYHIHSDVGHRCIGAKIGGRIVPFTYQLQMGDQVEIITQKQPNPSRDWLNPNLGYVTTSRGRSKIHAWFRKQDRDKNILAGRQILDDELAHLGISLKEAEKHLLPRYNFNELEELLAAIGGGDIRLNQMVNFLQSQFNKPSAEEQDAAALKQLQQKTYAPQNRRKDDGRVVVEGVGNLMHHIARCCQPIPGDEIVGFITQGRGISVHRADCEQLAELRSHAPERIVEAVWGESYSAGYSLVVRVQANDRSGLLRDITTILANEKVNVLGVASRSDIKQQIATIDMTIEIYNLQVLGRVLGKLNQVPDVIDARRLHGG

SEQ ID NO: 76094 - protein, 492 aa, Salmonella typhi
MSLRQKTISGVKWSAIATIVIIGLGLIQMTVLARIIDNHQFGLLTVSLVIIALADTISDFGIANSIIQRKTIGHLELTTLYWLNVGLGIVVFAVVFWLSDAIAHVLHNPDLAPLIKTLSLAFIVIPHGQQFRALMQKELEFNKIGMIETTSVLAGFTFTVISAHYWPLALTAILGYLVNSAVRTLLFGYFGRKIYRPGLHFSLASVSTNLRFGAWLTADSIVNYINTNLSTLVLARILGASVAGGYNLAYNVAVVPPAKLNPIITRVLFPAFAKIQDDTEKLRVNFYKLLSVVGIINFPALLGLMVVANNFVPLVFGEKWNSIIPILKLLCVVGLLRSVGNPIGSLLMAKARVDISFKFNVFKTFLFIPAILIGGHLAGAIGVTLGFLVVQIINTILSYFVMIKPVLGSSYRQYILSLWLPFYLSLPTFITSYGAGKLVDGYLPLSGVFALQVVVGILSFILMIIFSRNALVMEIKNQLVGSEKMKKLLRVG

SEQ ID NO: 76095 - protein, 407 aa, Salmonella typhi
MKILVYGINYSPELTGIGKYTGEMVAWMAREGHEVRVITAPPYYPQWKVGERYSAWRYRREEGEATVWRCPLYVPKQPSTLKRLLHLGSFALSSFFPLMAQRRWKPDRIIGVVPTLFCTPGMRLLATLSGARTVLHIQDYEVDAMLGLGMAGKGKRGSVARLATAFERSALRNVDNVSTISRSMMNKAREKGVAAEKILFFPNWSEVARFQDVNDADVTALRQQLGLPEGKKIVLYSGNIGEKQGLEKVIDAAERLRDRPLIFAIVGQGGGKARLENMARERGLLNIKFLPLQPYDALPALLKMGDCHLVVQKRGAADAVLPSKLTNILAVGGNAVITAEPHTELGQLCARYPGIAVCVEPESTDALVDGISQALAMPKNNTTAREYAERTLNKENVLRQFIADIRG

SEQ ID NO: 76096 - protein, 162 aa, Salmonella typhi
MLEDLRANSWSLRPCCMVLAYRIAHFCSVWRKKNVLNNLWAAPVLVLYRVITECLFGYEIQAAATIGRRFTIHHGYAVVINKHVVAGDDFTIRHGVTIGNRGADSLACPVIGHGVELGANVILLGDITIGNHVTIGAGSVVLDSIPDHALVVGEKARVKVST

SEQ ID NO: 76097 - protein, 719 aa, Salmonella typhi
MTEKVKQSAAVTGSDEIDIGRLVGTVIEARWWVLGTTAIFALCAVIYTFFATPIYSADALVQIEQNAGNSLVQDINSALANKPPASDAEIQLIRSRLVLGKTVDDLDLDIAVTKNTFPLFGAGWERLMGRHNEMVKVTTFTRPETMSGQIFTLKVLGDKRYQLVSDGGFSAQGVVGQPLNKDGVTMRVEAIDARPDTEFTVSKFSTLGMINNLQNNLTVTETGKDTGVLNLTFTGEDRDQIRDILNSITRNYLQQDIAWKSEEAGKSLAFLAKQLPEVRSRLDVAENKLNAFRQDKDSVDLPLEAKAVLDSMVNIDAQLNELTFKEAEISKLFTKAHPAYRTLLEKRKGLEDKKAKLNGRVTAMPKTQQEIVRLTRDVESGQQVYMQLLNKQQELKITEASTVGNVRIVDPAITQPGVLKPKKALIILGSIILGLMLSIVGVLLRSLFNRGIESPQALEEHGISVYASIPLSEWQKARDSVKTIKGIKRYKQSQLLAVGNPTDLAIEAIRSLRTSLHFAMMQAQNNVLMLTGVSSSIGKTFVCANLAAVISQTHKRVLLIDCDMRKGYTHELLGTNNVDGLSDILAGKGEIASCAKPTAIANFDLIPRGQVPPNPSELLMSERFGELIAWASSRYDLVLIDTPPILAVTDAAIVGRHVGTTLMVARYAVNTLKEVETSLSRFDQNGIQVKGVILNSIFRRATGYQDYGYYEYEYQSDSK

SEQ ID NO: 76098 - protein, 618 aa, Salmonella typhi
MRRFLTTLMILLVVLVAGFSALVLLVNPNDFRAYMVQQVAARSEYQLQLDGPLRWHVWPQLSILSGRMTLTARGASEPLVRADNMRLDVALWPLLSHQLHVKQVMLKGGVIQLTPQTEAVRSDDAPVAPKDNTLPDVAEDRGWSFDIRSLRVAGSVLVFQHENDDQVTVRDIRLNMEQDAEHRGTFDFSGRVNRDQRDLALSFSGTVDASDYPHNLTAGIEQLRWQLQGADLPAQGIEGQGQLQAQWQEAQKRLSFNHLNLTANDSSLTGHVQVTLAEQPEWQIDLRSSKLNLDNLLPHHSAVAQTGGAVSQGQNTLPLTRPVIASRVGAPPYQGLQSFTAEIALQADSVRWRGMDFTQVSTKMSNQTGLLDITELQGKLADGEMSLPGTLDARTASPRIEFHPRLNHVEIGTILKAFNYPISLTGKMSLVGDFSGADIDAEAFRHSWKGKAHVDMSNTRLEGMNFQQLVQQAVERSGGDAQQSQENMDNATRLDRFTTDLTLNKGTLTLDDMVGQSSMLALTGSGTLDLVKQSCDTQFNLRVLGGWNGDSNLITFLKETPVPLRVYGKWQELNYTLQVEQLLRKHLQDEAKRRLNDWADRNKDTRNGKDVKKLLNKL

SEQ ID NO: 76099 - protein, 870 aa, Salmonella typhi
MTQQPQAKYRHDYRAPDYQITDIELTFDLDAEKTVVTAISQAVRHGAPDAPLRLDGEDLTLVSIHVNDAPWTAYKEEEGALIISDLPERFTLRIVNEISPAANTALEGLYQSGDALCTQCEAEGFRHITWYLDRPDVLARFTTKIIADKSKYPFLLSNGNRVAQGELENGRHWVQWQDPFPKPCYLFALVAGDFDVLRDTFTTRSGREVALELYVDRGNLDRAPWAMTSLKNSMKWDETRFGLEYDLDIYMIVAVDFFNMGAMENKGLNIFNSKYVLARTDTATDKDYLDIERVIGHEYFHNWTGNRVTCRDWFQLSLKEGLTVFRDQEFSSDLGSRAVNRISNVRTMRGLQFAEDASPMAHPIRPDKVIEMNNFYTLTVYEKGAEVIRMIHTLLGEENFQKGMQLYFERHDGSAATCDDFVQAMEDASNVDLSHFRRWYSQSGTPIVTVKDDYNPETEQYTLTISQRTPATADQAEKQPLHIPFAIELYDNEGNVIPLQKGGHPVNAVLNVTQAEQTFTFDNVYFQPVPALLCEFSAPVKLEYKWSDQQLTFLMRHARNDFSRWDAAQSLLATYIKLNVARHQQGQPLSLPVHVADAFRAVLLDEKIDPALAAEILTLPSANEIAELFEVIDPIAIAQVREALTRTLAAELADEFLAIYNANHLDEYRVDHGDIGKRTLRNACLRFLTFGETELANTLVSKQYRDANNMTDALAALSAAVAAQLPCRDTLMQEYDDKWHQDGLVMDKWFILQSTSPAENVLETVRSLLKHRSFSMSNPNRIRSLIGAFAGSNPAAFHAQDGSGYQFLVEMLTDLNSRNPQVASRLIEPLIRLKRYDDKRQEKMRAALEQLKGLENLSGDLYEKITKALA

SEQ ID NO: 76100 - protein, 586 aa, Salmonella typhi
MTITKLAWRDLVPDSESYQEIFAQPHATDENDTLLSDTQPRLQFALEQLIQPWASSSFMLTKAPEEQEYLTLLSDAVRALQTDAGQLTGGHYDVSGHTVHYRAAQNAQDNFATVTQVVSADWVEAEQLFGCLRQYNGDITLQPGLVHQANGGVLIISLRTLLAQPLLWMRLKAIVSRERFDWVAFDESRPLPVSVPSMPLKLKVILVGERESLADFQEMEPELAEQAIYSEFEDNLQIADAEAMTLWCQWVTRIALRDNLPPPAPDAWPVLIREAVRYTGEQDTLPLCPLWIARQFKEASPLCEGDTCGAEALSLMLARREWREGFLAERMQGEILQEQILIETEGERVGQINALSVIEFPGHPRAFGEPSRISCVVHIGDGEFNDIERKAELGGNIHAKGMMIMQAFLMSELQLEQQIPFSASLTFEQSYSEVDGDSASMAELCALISALANVPVNQNIAITGSVDQFGRAQPVGGLNEKIEGFFAICEQRELNGKQGVIIPAANVRHLSLKSELLQAVKEEKFTIWAVDDVTDALPLLLNLVWDGEGQTTLMQTIQERIAQATQQEGRHRFPWPLRWLNAFIPN

SEQ ID NO: 76101 - protein, 717 aa, Salmonella typhi
MLSPLIRRYTWNSTWLYYIRIFIALCGTTALPWWLGDVKLTIPLTLGMVAAALTDLDDRLAGRLRNLIITLICFFIASASVELLFPWPWLFALGLTLSTSGFILLGGLGQRYATIAFGALLIAIYTMLGASLYDHWYQQPLLLLAGAVWYNLLTLTGHLLFPIRPLQDNLARSYEQLAHYLELKSRLFDPDIEDESQAPLYDLALANGQLMATLNQTKVSLLTRLRGDRGQRGTRRTLHYYFVAQDIHERASSSHIQYQTLRDYFRHSDVMFRFQRLMSMQAQACTQLARCILLRTPYQHDPRFERVFTHIDAALERMRASGASLELLNTLGFLLTNLRAIDAQLATIESEQAQAMPRNESENQLADDSLHGFSDIWLRLSRNFTPESALFRHAVRMSLVLCIGYALIQITGMRHGYWILLTSLFVCQPNYNATRHRLALRIIGTLVGVAIGLPILWFVPSLEGQLVLLVITGVLFFAFRNVQYAHATMFITLLVLLCFNLLGEGFEVALPRVIDTLIGCAIAWAAVSFIWPDWRFRNLPRVLQRATDANCRYLDAILEQYHQGRDNRLAYRIARRDAHNRDAELASVVSNMSSEPDVTAETREAAFRLLCLNHTFTSYISALGAHREKLSNPDVLGLLDDAVCYVDDALHHQPEDEQRVHQALEGLKQRVQSLETRPDSKEPLVVQQIGLLIALLPEIGRLQRQISPPTSTLITQP

SEQ ID NO: 76102 - protein, 403 aa, Salmonella typhi
MTESTFPQYPRLVLSKGREKSLLRRHPWVFSGAVSRLEGKANLGETIDIVDHQGKWLARGAWSPASQIRARVWTFDKTESIDIAFFTRRLRQAQQWRDWLAKKDGLDSYRLIAGESDGLPGVTIDRFGHFLVLQLLSAGAEYQRAALISALQTCYPDCAIYDRSDVAVRKKEGMALTQGPVTGELPPALLPIEEHGMKLLVDIQGGHKTGYYLDQRDSRLVTRRYVENQRVLNCFSYTGGFAVSALMGGCRQVVSVDTSQDALDIARQNVELNQLDLSKAEFVRDDVFKLLRAYREHGEKFDVIIMDPPKFVENKSQLMGACRGYKDINMLAIQLLNPGGILLTFSCSGLMTSDLFQKIIADAAIDAGRDVQFIEQFRQAADHPVIATYPEGLYLKGFACRVM

SEQ ID NO: 76103 - protein, 257 aa, Salmonella typhi
MHIRHQDLTTAEVRSSHLHRLHRVTLFSAAICHITQGSKVIIQDDSRLVAGPGELIIIPANTPLENQPAQNGFRSDLLLLSPEIIARFKTMYVQDYPPANLTSLCTPMSRSLTFMWENVLDAVRQGLPVGLQEHQAMGLLLALLHDGAAGPLLIERRYTLTEQVRQLIMLSPAKLWTAQEIARRLAMGTSTLRRRLQRESQSYRQIIEEVRMSCALSQLQSTTLPIGEIALRCGYLSGSRFTARFRQHYGCLPSQVR

SEQ ID NO: 76104 - protein, 454 aa, Salmonella typhi
MVKLSMTLRLTISFIAILILACTGISWTLYNALSKELTYRDDMTLINRAAQMQQLLLDGARPENLPLYFNRMVDTKQDILLIHSATGHNVAINHSGIPDQRFNEIPLAKNITRETLFRQAVQGTELTAVRVNARSGDNPLTLTIARLATERRQMLAQYRRNSLLISLIAILVCSALSPLVIRNGLRAITSLSRLTAATDSGTLRQPLAEQALPVELRPLGQALNTMRQKLSDDFERLNQFADDLAHELRTPVNILLGKNQVMLSQERSAEEYQQALVDNIEELEGLSRLTENILFLARAEHQNIAVKKQPVSLNALVENMLDYLSPLAEEKHICFINQCQGTVWADEILLQRVLSNLLTNAIRYSDENAVIRIESAYDDNVAEIRVANPGSPTADADKLFRRFWRGDNARHTAGFGLGLSLVNAIALLHGGSASYRYADEHNIFSVRLPDSGDS

SEQ ID NO: 76105 - protein, 429 aa, Salmonella typhi
MKGTVFAVALNHRSQLDAWQEAFSQPPYNAPPKTAVWFIKPRNTVIRHGEPIPYPQGEKVLSGATVALIVGKTASRIRPEAAADYIAGYALANEVSLPEESFYRPAIKAKCRDGFCPLGEMAPLSDVDNLTIITEINGREADHWNTADLQRSAAQLLSALSEFATLNPGDAILLGTPQNRVALRPGDRVRILAKGLPALENPVVAEDEFARHQTFTWPLSATGTLFALGLNYADHASELAFTPPKEPLVFIKAPNTFTEHHQTSVRPNNVEYMHYEAELVVVIGKTARKVSEAEAMEYVAGYTVCNDYAIRDYLENYYRPNLRVKSRDGLTPIGPWIVDKEAVSDPHNLTLRTFVNGELRQEGTTADLIFSIPFLISYLSEFMTLQPGDMIATGTPKGLSDVVPGDEVVVEVEGVGRLVNRIVSEESAK

SEQ ID NO: 76106 - protein, 283 aa, Salmonella typhi
MGKLALAAKITHVPSMYLSELPGKNHGCRQAAIDGHIEIGKRCREMGVDTIIVFDTHWLVNSAYHINCADHFQGVYTSNELPHFIRDMTYDYDGNPALGHLIADEAVKLGVRAKAHNIPSLKLEYGTLVPMRYMNSDKHFKVVSISAFCTVHDFADSRKLGEAILKAIEKYDGTVAVFASGSLSHRFIDDQRAEEGMNSYTREFDHQMDERVVKLWREGKFKEFCTMLPEYADYCYGEGNMHDTVMLLGMLGWDKYDGKVEFITDLFASSGTGQVNAVFPLPA

SEQ ID NO: 76107 - protein, 126 aa, Salmonella typhi
MPHFIAECTENIREQADLPSLFSKVNEALAATGIFPIGGIRSRAHWLDTWQMADGKHDYAFVHMTLKIGAGRSLESRQEVGEMLFGLIKAHFADLMENRYLALSFEIAELHPTLNYKQNNVHALFK

SEQ ID NO: 76108 - protein, 289 aa, Salmonella typhi
MEYSILSNNLKMPMVGFGVFKVTDKEECQQSVLSAIRSGYRLIDTAAVYGNEDAVGDAVREAIATGLCTREELFITSKLWVQDMANYDLAKAGIEASLKKSGLDYFDLYLLHQAMGDYFSAWRALEDAYEAGKLKAIGVSNFYAHVLANFCETVRITPMVNQVELHPYFAQPAALETMKHYNVQPEAWAPLGGGRHKPYENVMLQRIADAHQKTIAQVVLRWNVQRGVTVIPKSTRQERIEENFAIWDFSLTDNEMAQINALDLGYVGEAVKHFNPEFVRGCLGVKIHD

SEQ ID NO: 76109 - protein, 306 aa, Salmonella typhi; identical to SEQ ID NO: 73201

SEQ ID NO: 76110 - protein, 171 aa, Salmonella typhi; identical to SEQ ID NO: 74951

SEQ ID NO: 76111 - protein, 144 aa, Salmonella typhi; identical to SEQ ID NO: 74949

SEQ ID NO: 76112 - protein, 293 aa, Salmonella typhi
MEPQPPRLKPGKILDTLGAMQKSLTRASQRIAQYILAFPRQVTQSSIADLSRDTQAGEATVIRFCRTLGYKGFQDFKMDLAIELATTESDDSSPLLDAEVSESDDAHAIGLKLQNTISNVLSETLNLLDMQQVLGVVDALRHCHSVYIFGVGSSGITALDMKHKLMRIGLRGDAVSNNHFMYMQATLLKAGDVAMGVSHSGTSPETVHSLRLARQAGATTVAITHNLGSPLCEEADFCLINGNRQGMLQGDSIGTKAAQLFVFDLLYTLLVQSSPEQARESKLRTMNALDMTK

SEQ ID NO: 76113 - protein, 426 aa, Salmonella typhi
MIAKFFPWYSEITRPQKNALFSAWLGYVFDGFDFMLIFYIMYLIKADLGLTDMEGAFLATAAFIGRPFGGALFGLLADKFGRKPLMMWSIVAYSVGTGLSGLASGVIMLTLSRFIVGMGMAGKYACASTYAVESWPKHLKSKASAFLVSGFGIGNIIAAYFMPSFAEAYGWRAAFFVGLLPVLLVIYIRARAPESKEWEEAKLSGLGKHSQSAWSVFSLSMKGLFNRAQFPLTLCVFIVLFSIFGANWPIFGLLPTYLAGEGFDTGVVSNLMTAAAFGTVLGNIVWGLCADRIGLKKTFSIGLLMSFLFIFPLFRIPQDNYLLLGACLFGLMATNVGVGGLVPKFLYDYFPLEVRGLGTGLIYNLAATSGTFNSMAATWLGITMGLGAALTFIVAFWTATILLIIGLSIPDRLKARRERFQSTKEF

SEQ ID NO: 76114 - protein, 337 aa, Salmonella typhi
MCNHKQSDRVLNLPAGYFGIVLGTIGMGFAWRYASQIWAISHWPGDIMVILAMIIWALLTLAFLSRLVRFPHSVMAEVRHPVMSSFVSLFPATTMLVAIGFVPWYRPLAVALFSVGVVIQLAYAAWQTAGLWRGAHPEEATTPGLYLPTVANNFISAMACGALGYNDAGLVFLGAGVFSWLSLEPVILQRLRSCGELPAVLRMSLGIQLAPALVACSAWLSVNGGEGDTLAKMLFGYGLLQLLFMLRLMPWYLSQPFNASFWSFSFGVSALTTTGLHLGHGSESGFFHILAVPLFIFTNAIIALLLVRTFLLLVQGTLLIRTERAALLKTEEKNDRS

SEQ ID NO: 76115 - protein, 654 aa, Salmonella typhi
MRQQPHYLELLSPARDAAIAREAILHGADAVYIGGPGFGARHNASNSLRDIADLVPFAHRYGARIFVTLNTILHDDELEPAQRLITDLYNTGVDALIVQDMGILELDIPPIELHASTQCDIRSVEKAKFLADVGFSQIVLARELNLSQIAAIHQATDATIEFFIHGALCVAYSGQCYISHAQTGRSANRGDCSQACRLPYTLKDDQGRVVSYEKHLLSMKDNDQTANLGALIDAGVRSFKIEGRYKDMSYVKNITAHYRQMLDAIIEQRGDLARASVGRTEHFFVPSTEKTFHRGSTDYFVNARKGDIGAFDSPKFIGLPVGEVLNVAKDYLDVEATEPLANGDGLNVLIKREVVGFRANTVEKTGHNRYRVWPNDMPADLHKVRPHHPLNRNLDHNWQQALTKTSSERRVAVDIMLGGWQEQLILTLTSEDGVCITHTLDGVFEEANNSEKALNNLTAGLAKLGQTLYYARDMQVTLPAALFVPNSLLNQFRREAIDMLDAARLAHYQRGRRKPVAQPAPVYPQTHLSFLANVYNHKAREFYHRYGVQLIDAAYEAHQEKGEVPVMITKHCLRFAFNLCPKQAKGNIKSWKATPMQLVHGDEVLTLKFDCRPCEMHVIGKIKNHILKMPQPGSVVASVSPEALMKTLLKRRGV

SEQ ID NO: 76116 - protein, 618 aa, Salmonella typhi
MPIQVLPPQLANQIAAGEVVERPASVVKELVENSLDAGATRVDIDIERGGAKLIRIRDNGCGIKKEELALALARHATSKIASLDDLEAIISLGFRGEALASISSVSRLTLTSRTAEQAEAWQAYAEGRDMDVTVKPAAHPVGTTLEVLDLFYNTPARRKFMRTEKTEFNHIDEIIRRIALARFDVTLNLSHNGKLVRQYRAVAKDGQKERRLGAICGTPFLEQALAIEWQHGDLTLRGWVADPNHTTTALTEIQYCYVNGRMMRDRLINHAIRQACEDKLGADQQPAFVLYLEIDPHQVDVNVHPAKHEVRFHQSRLVHDFIYQGVLSVLQQQTETTLPLEEIAPAPRHVPENRIAAGRNHFAVPAEPTAAREPATPRYSDGASGGNGGRQSAGGWPHAQPGYQKQQGEVYRTLLQTPTTSPAPEPVAPALDGHSQSFGRVLTIVGGDCALLEHAGTIQLLSLPVAERWLRQAQLTPGQSPVCAQPLLIPLRLKVSADEKAALQKAQSLLGELGIEFQSDAQHVTIRAVPLPLRQQNLQILIPELIGYLAQQTTFATVNIAQWIARNVQSEHPQWSMAQAISLLADVERLCPQLVKAPPGGLLQPVDLHSAMNALKHE

SEQ ID NO: 76117 - protein, 419 aa, Salmonella typhi
MAWNQPGNNGQDRDPWGSSKPGSNSGGNGNKGGRDQGPPDLDDIFRKLSKKLGGFGGGKGTGSGGGSSSQGPRPQLGGRIVAIAAAAVVIIWAASGFYTIKEAERGVVTRFGKFSHLVEPGLNWKPTFIDDVTPVNVEAVRELAASGVMLTSDENVVRVEMNVQYRVTDPQKYLFSVTSPDDSLRQATDSALRGVIGKYTMDRILTEGRTVIRSDTQRELEETIKPYNMGITLLDVNFQAARPPEEMKAAFDDAIAARENEQQYIREAEAYTNEVQPRANGQAQRILEEARAYKTQTILEAQGEVARFAKILPEYKAAPQITRERLYIETMEKVLSHTRKVLVNDKSGNLMVLPLDQMLKGGNAPAAKSDNSASNLLRLPPSTKSNASGASNTSSSNQGDIMDQRRANAQRNDYQRQGE

SEQ ID NO: 76118 - protein, 256 aa, Salmonella typhi
MVKCVSSFLLFSLLSVQAISAENHIDLHQPKDFVDITTVAPDVQVDMRYFTSHNFIGRPIKGYNAPVCLLTRPAANAVKQVADRLRPFGLTLKIYDCYRPQSAVNDFIAWAKDPSQNQMKNEFYPQVEKNRLFEEGYLAARSGHSRGSTLDLTIVPLDSKIPIYHPGRPLVNCTASAAQRSPDNSLDFGTGFDCFSPLSHPDNVMLTAQQRANRLLLQTLMRDAGFTPLDTEWWHFSLTHEPYPNTWFDFPVKQRP

SEQ ID NO: 76119 - protein, 474 aa, Salmonella typhi
MKKYQRLAEQIREQIASGVWQPGDRLPSLREQVASSGMSFMTVGHAYQLLESQGRIIARPQSGYYVAPHPVCRSVATAAHVIRDEAVDINTYIFEMLQASRDTSVVPFASAFPDPRLFPLPQLNRSLAQVSKTETAMSVIENLPPGNAELRYAIARRYAQQGITVSPDEIVITAGALEALNLSLQAVTAPGDWVVVENPCFYGALQALERLRLKALSIPTDVKEGIDLMALEQALQEYPVKACWLMTNSQNPLGFTLSAEKKARLVALLTHHNVTLIEDDVYSELYFGREKPLPAKAWDRDDTVLHCSSFSKCLVPGFRIGWVAGGSHARQIQRLQLMSTLSTSSPMQLALVDYLSTRRYDAHLRRLRRQLAERKQQAWQTLLRHLPAEVKIHHNDSGYFLWLELPEQLDAGELSAKALEHLISIAPGKMFSTSGAWTRFFRFNTAWHWGEREEQAVKQLGSLIREMLSAKSLV

SEQ ID NO: 76120 - protein, 481 aa, Salmonella typhi
MTIWENAMQYQLLINGVLVDGEGERQSVYNPATGEVILEIAEASPVQVDAAVLAADSAFAEWGQTTPKARAECLLKLADSIEQNALEFARLESQNCGKPLHCVINDEIPAIVDVFRFFAGAARCLSGLAAGEYLEGHTSMIRRDPIGVVASIAPWNYPLMMAAWKLAPALAAGNCVVIKPSEITPLTALKLAALAKDIFPPGVLNVLFGRGQTVGDVLTGHEKVRMVSLTGSIATGEHILRHTAPAIKRTHMELGGKAPVIVFDDADLDAVAQGVRTFGFYNAGQDCTAACRIYAQRGIYDALVEKLGNAVSSLKMGAPEDKSTELGPLSSLAHLKRVTAAVEEAKALSHIRVITGGSQTEGKGYYFAPTLLADAKQEDAIVQREVFGPVVSITVFDDEDQVLRWANDSRYGLASSVWTQDVGRAHRLSARLQYGCTWINTHFMLVSEMPHGGQKQSGYGKDMSLYGLEDYTLVRHIMVKH

SEQ ID NO: 76121 - protein, 715 aa, Salmonella typhi
MTKPLNATQAVIEWVNNTRRYATRLDDEADALLAQLTLAAADESALNAACASSHGCVGLYGYAQSAKAHLLTTLCGNENGKLEIITPDRDYDYFSHINPGHAPANMAIRFTRDIFSNESGWPLRLRLISEAELVQIFIAWTSSSPVCRQVEKSIITSRLEKWQSLRQPQPVPGVTAEEVATIASFWRSCLPSARQHIDDATWQHFASLLPALDLTTRAHAWALLWGEQPEITQQWLALAHMLQQTGHAGELAAPLSLLVDHFGLPAENFLTQMALTASDTQSDVVVHPVKEGRLLNAVSLSLDSLALLTRELVLTVENSVLDNVDLLDIPVAPDSHPHPLWRAKLGWMLAHYRQQIQPDVLVICNALASRSQTSTAARHLLEWVNATQPQHESALPGVVWAITPQDARFATQQNLDEAVQQLMGKPGVHWGTLQALDKHSMQRLVEWLSQATSAPQRQARLQALREQLRGRVRDLLPMCDDARLPVETVIRRLQAQAARHGDLLAGLLPPVQNFEALLRTRQSREEQVSGLFNDAIDLFADEPTHASASEGHETGYQAHKMWINHLRQWAHCRDNAQRLGLEPQMLNAVAEILITASYRLGLPQQLQKTMQREEVSGAQLHAIIGNFIAWLGYANIEEAQRPASRVQKGAAIFAATPRSTMLRLTKLDEQPVHAASRYVYDWLVALYTLANENAGYRHPQDVTDVDRAQLIALIA

SEQ ID NO: 76122 - protein, 432 aa, Salmonella typhi; identical to SEQ ID NO: 75268

SEQ ID NO: 76123 - protein, 345 aa, Salmonella typhi
MKQQTNRNRRWVLASRPHGAPQMDNFRLEEDDVATPGEGQVLLRTVFLSLDPYMRGRMSDEPSYAPPVEPGCVMVGGTVSRVVASNHPDYRPDEWVLSYNGWQDYDISDGEGLVKLGDNPQHPSWSLGVLGMPGFTAYMGLLDIGQPKEGETLVVAAATGPVGATVGQIGKLKGCRVVGIAGGAEKCRHATDVLGFDLCLDHHADNFPQQLAQACPQGIDIYYENVGGKVFDAVLPLLNTSARIPLCGLVSGYNATTLPDGPDRLPLLMATLLKKRIRLQGFIINQDYGHRIHEFQQEMGRWIKEGKIHYREQITDGLENAPEAFIGLLAGKNFGKVVIRLADDA

SEQ ID NO: 76124 - protein, 221 aa, Salmonella typhi
MPGTEKTQHISLTTQVENRLKHQLSIGALKPGARLITKNIAQELGVSITPVREALLRLVSSSALAVAPAQAFMVPEISLESLLEINTIRTALEEMAVVAAAGKITPDREQTLNALLDEFQQALESGVMEKILLANRAFRFEIYHYADMPTLYAMIEQLWVRLGPSLHFLYDNFKLDDYQNGVNLYRKLLNALVTGDKEASRHCLQNVLQQNVATIKNQYFM

SEQ ID NO: 76125 - protein, 353 aa, Salmonella typhi
MHLRHLFSPRLRGSLLLGSLLVASSFSTLAAEDMLRKAVGKGAYEMAWSQQENALWLATSQSRKLDKGGVVYRLDPVTLEITQAIHNDLKPFGATINAATQTLWFGNTINSAVTAIDAKTGDVKGRLVLDARKRTEEVRPLQPRELVADAATNTIYISGVGKESAIWVVDGETIKLKTTIENTGKMSTGLALDSKAQRLYTTNADGEFITIDTASNKILSRKKLLDDGKEHFFINLSLDTAGHRAFITDSKATEVLVVDTRNGNILAKIAAPASLAVLYNPTRNEAYVTHRQAGQVSVIDAKTYNVVKTFDTPTYPNSLALSADGKTLYVSVKQKSTREQEATQPDDVIRIAL

SEQ ID NO: 76126 - protein, 251 aa, Salmonella typhi
MTEAQRHQILLDMLAQLGFVTVENVIERLGISPATARRDINKLDESGKLKKVRNGAEAITQQRPRWTPMNLHQAQNHDEKVRIAKAASQLVNPGESVVINCGSTAFLLGREMCGKPVQIITNYLPLANYLIDQEHDSVIIMGGQYNKSQSITLSPQGSENSLYAGHWMFTSGKGLTADGLYKTDMLTAMAEQKMLSVVGKLVALVDSSKIGERAGMLFSRADQIAMLITGKNANPQVLQQLEAQGVSILRV

SEQ ID NO: 76127 - protein, 226 aa, Salmonella typhi
MIQYLNVFFYDIYPYICATVFFLGSWLRYDYGQYTWRASSSQMLDKRGMVIWSNLFHIGILGIFFGHLFGMLTPHWMYAWFLPIAVKQQMAMILGGVCGVLTLIGGAGLLWRRLTNQRVRATSTTPDIIIMSILLIQCLLGLSTIPFSAQYPDGSEMMKLVGWAQSIVTFRGGSSEILNGVAFVFRVHLVLGMTIFLLFPFTRLVHVWSAPFEYFTRRYQIVRTRR

SEQ ID NO: 76128 - protein, 514 aa, Salmonella typhi
MKIRSQVGMVLNLDKCIGCHTCSVTCKNVWTGREGMEYAWFNNVETKPGIGYPKNWEDQQEWQGGWVRDVNGKIRPRLGGKMGVISKIFANPVIPQIDDYYEPFTFDYQHLHTAPESKHQPTARPRSLIDGKRMDKVIWGPNWEELLGGEFEKRARDRNFDNIQKEMYGQFENTFMMYLPRLCEHCLNPSCVATCPSGAIYKREEDGIVLIDQDKCRGWRLCISGCPYKKIYFNWKSGKSEKCIFCYPRIESGQPTVCSETCVGRIRYLGVLLYDADRIEEAASTEHETDLYERQCDVFLNPHDPAVIEEALKQGIPQNVIDAAQRSPVYKMAMDWKLALPLHPEYRTLPMVWYVPPLSPIQSYADAGGLPHNGNILPAVETLRIPVQYLANMLSAGDTGPVIRALKRMMAMRHYMRSQTVEGVTDTRAIDEVGLSVQQVEEMYRYLAIANYEDRFVIPTSHREMARDAFPERNGCGFTFGDGCHGSDTKFNLFNSSRIDAINITEVRDKAEGE

SEQ ID NO: 76129 - protein, 495 aa, Salmonella typhi
MFRQWLTLVIIVLVYIPVAIDATVLHVAAPTLSMTLGASGNELLWIIDIYSLVMAGMVLPMGALGDRIGFKRLLMLGGTLFGLASLAAAFSHTASWLIATRVLLAIGAAMIVSATLAGIRATFCEEKHRNMALGVWAAVGSGGAAFGPLIGGILLEHFYWGSVFLINVPIVLVVMGLTARYVPRQAGRRDQPLNLGHAVMLIIAILLLVYSAKTALKGNLSLWVISLTLLTGALLLGLFIRTQLATSRPMIDMRLFTHRIILSGVVMAMTAMITLVGFELLMAQELQFVHGLSPYEAGVFMLPVMVASGFSGPIAGALVSRLGLRLVATGGMALSALSFYGLAMTDFSTQQWQAWGLMALLGFSTASALLASTSAIMAAVPAEKAAAAGAIETMAYELGAGLGIAIFGLLLSRSFSASIRLPAGLEAQEIARASSSMGEAVQLANSLPPTQGQAILDAARHAFIWSHSVALSSAGSMLLLLAVGMWFSLAKAQRR

SEQ ID NO: 76130 - protein, 228 aa, Salmonella typhi
MQKLKQQVFDANMDLPRYGLVTFTWGNVSAIDRERGLVVIKPSGVAYETMKVDDMVVVDMDGKVVEGRYRPSSDTATHLALYQRYPSLGGVVHTHSTHATAWAQAGMAIPALGTTHADYFFGDIPCTRALSEEEVQGEYELNTGKVIIETLGEVEPLHTPGIVVYQHGPFAWGKDAHDAVHNAVVMEEVARMAWIARGINPGLNPIDDYLMNKHFMRKHGPNAYYGQK

SEQ ID NO: 76131 - protein, 131 aa, Salmonella typhi; identical to SEQ ID NO: 75286

SEQ ID NO: 76132 - protein, 104 aa, Salmonella typhi
MTNRLTLSGTVCRAPLRKVSPSGIPHCQFVLEHRSVQEEAGFHRQAWCQMPVIVSGHENQAITHSITVGSRITVQGFISCHKAKNGLSKMVLHAEQIELIDSGD

SEQ ID NO: 76133 - protein, 75 aa, Salmonella typhi; identical to SEQ ID NO: 42796

SEQ ID NO: 76134 - protein, 149 aa, Salmonella typhi; identical to SEQ ID NO: 73118

SEQ ID NO: 76135 - protein, 296 aa, Salmonella typhi; identical to SEQ ID NO: 74956

SEQ ID NO: 76136 - protein, 321 aa, Salmonella typhi; identical to SEQ ID NO: 74955

SEQ ID NO: 76137 - protein, 139 aa, Salmonella typhi
MKKGTVLNSEISSVISRLGHTDTLVVCDAGLPIPNSTARIDMALTQGVPSFMQVVDVVTWEMQVEAAILATEIKQQNPQLHETLLTHLEQLQQHQGNTIKISYTTHEQFKKLTADSQAVIRSGECSPYANVIICAGVTF

SEQ ID NO: 76138 - protein, 220 aa, Salmonella typhi
MAYRDQPLGELALSIPRASALFRQYDMDYCCGGKQTLARAAARHDVDIDIIEAQLAQLAEQPIEKDWRAVPLADIIDHIVVRYHDRHREQLPELILQATKVERVHADKPNVPRGLTKYLTALHEELSSHMMKEEQILFPMIKQGMGRQATGPISVMESEHDEAGELVDVIKHVTQNVTPPPEACTTWKAMYNGINEMIDALMEHISLENNVLFPRALAGE

SEQ ID NO: 76139 - protein, 622 aa, Salmonella typhi
MSTDNKQSLPAITLAAIGVVYGDIGTSPLYTLRECLSGQFGFGVERDAVFGFLSLIFWLLIFVVSIKYLTFVMRADNAGEGGILTLMSLAGRNTSARTTSMLVIMGLIGGSFFYGEVVITPAISVMSAIEGLEIVAPQLDTWIVPLSIIVLTLLFMIQKHGTGMVGKLFAPIMLTWFLILAVLGLRSIIANPEVLHALNPVWAVRFFLEYKTVSFIALGAVVLSITGVEALYADMGHFGKFPIRLAWFTVVLPSLVLNYFGQGALLLKHPEAIKNPFFLLAPDWALIPLLILAALATVIASQAVISGVFSLTRQAVRLGYLSPMRIIHTSEMESGQIYIPFVNWLLYFAVVVVIVSFEHSSNLAAAYGIAVTGTMVLTSILSTTVARKNWHWNKYFVALILIAFLCVDIPLFSANLDKLLSGGWLPLSLGLIMFTIMTTWKSERFRLLRRMHEHGNSLEAMIASLEKSPPVRVPGTAVYMSRALSVIPFALLHNLKHNKVLHERVILLTLRTEDAPYVHNVRRVQIEQLSPTFWRVVASYGWRETLNVEEVFHRCGLEGLSCRMMETSFFMSHESLIVGKRPWYLRLRGKLYLLLQRNALRAPDQFEIPPNRVIELGTQVEI

SEQ ID NO: 76140 - protein, 475 aa, Salmonella typhi
MKKTTLAMSALALSLGLALSPLSATAAETSSSAMTAQQMPSLAPMLEKVMPSVVSINVEGSTTVNTPRMPRNFQQFFGDDSPFCQDGSPFQNSPFCQGGGNGGNGGQQQKFMALGSGVIIDAAKGYVVTNNHVVDNASVIKVQLSDGRKFDAKVVGKDPRSDIALIQIQNPKNLTAIKLADSDALRVGDYTVAIGNPFGLGETVTSGIVSALGRSGLNVENYENFIQTDAAINRGNSGGALVNLNGELIGINTAILAPDGGNIGIGFAIPSNMVKNLTSQMVEYGQVKRGELGIMGTELSSELAKAMKVDAQRGAFVSQVMPNSSAAKAGIKAGDVITSLNGKPISSFAALRAQVGTMPVGSKISLGLLREGKAITVNLELQQSSQSQVDSSTIFSGIEGAEMSNKGQDKGVVVSSVKANSPAAQIGLKKGDVIIGANQQPVKNIAELRKILDSKPSVLALNIQRGDSSIYLLMQ

SEQ ID NO: 76141 - protein, 385 aa, Salmonella typhi
MAGWHLDTKMAQDIVARTMRIIDTNINVMDARGRIIGSGDRERIGELHEGALLVLSQGRVVDIDNAVARHLHGVRQGINLPLRLEGEIVGVIGLTGEPEHLRKYGELVCMTAEMMLEQSRLMHLLAQDSRLREELVMNLIQAEENTPALVEWAQRLGIDLNQPRVAAVVEVDSGQLGVDSAMAELQQLQNALTTPERNNLIAIVSLTEMVVLKPALNSFGRWDAEDHRKRVEQLISRMKENGQLRFRVALGNYFTGPGSIARSYRTARTTMMVGKQRMPESRSYFYQDLMLPVLLDSLRGGWQANELARPLVKLKAMDNNGLLRRTLTAWFRHNVQPLATSKALFIHRNTLEYRLNRISELTGLDLGNFDDRLLLYVALQLDEQR

SEQ ID NO: 76142 - protein, 274 aa, Salmonella typhi
MQQLQNVIETAFERRADITPANVDTVTREAVKQVISLLDSGALRVAEKIDGQWVTHQWLKKAVLLSFRINDNQVIDGAESRYFDKAPMKFADYDEARFQKEGFRVVPPAAVRQGAFIARNTVLMPSYVNIGAYVDEGTMVDTWATVGSCAQIGKNVHLSGGVGIGGVLEPLQANPTIIEDNCFIGARSEVVEGVIVEEGSVISMGVYLGQSTKIYDRETGEVHYGRVPAGSVVVSGNLPSKDGKYSLYCAVIVKKVDAKTRGKVGINELLRTID

SEQ ID NO: 76143 - protein, 890 aa, Salmonella typhi
MNTLPEQHANTALPTLPDQPQNPGVWPRAELTVAGIKARIDIFQHWLGEAFDSGICAEQLIEARTEFIDQLLQRLWIEAGFGQIADLALVAVGGYGRGELHPLSDIDLLILSRKKLPDEQAQKVGELLTLLWDVKLDVGHSVRTLEECLLEGLSDLTVATNLIETRLLIGDVALFLALQKHIFSEGFWPSDKFYAAKVEEQNQRHQRYHGTSYNLEPDIKSSPGGLRDIHTLQWVARRHFGATSLDEMVGFGFLTPAECAELNECLHILWRIRFALHLVVSRYDNRLLFDRQLSVAQRLNYSGEGNDPVERMMKDYFRVTRRVSELNQMLLQLFDEAILALPADEKPRPVDDEFQLRGTLIDLRDDTLFIREPQAILRMFYMMVRNSAITGIYSTTLRHLRHARRHLSQPLCYIPEARTLFLSMLRHPGAVSRGLLPMHRHSVLWAYMPQWSHIVGQMQFDLFHAYTVDEHTIRVMLKLESFAKEETRQRHPLCVDLWPRLPHPELILIAALFHDIAKGRGGDHSVLGAQDVLTFAELHGLNSRETQLVAWLVRQHLLMSVTAQRRDIQDPEVIKQFAEEVQTETRLRFLVCLTVADICATNETLWNSWKQSLLRELYFATEKQLRRGMQNTPDMRERVRHHQLQALALLRMDNIDEAALHKIWTRCRANYFVRHSPNQLAWHARHLLQHDLSQPLVLLSPQATRGGTEIFIWSPDRPYLFAAVCAELDRRNLSVHDAQIFTTRDGMAMDTFIVLEPDGSPLAADRHDVIRTGLEQTITQHSWQPPQPRRQPAKLRHFTVETEVNFLPTHTDRKSFMELIALDQPGLLARVGQIFADLGISLHGARITTIGERVEDLFIIATADRRALNNVLQLEVQQRLTAALNPNDKG

SEQ ID NO: 76144 - protein, 241 aa, Salmonella typhi; identical to SEQ ID NO: 75272

SEQ ID NO: 76145 - protein, 629 aa, Salmonella typhi
MFYQDPFDVIIIGGGHAGTEAAMAAARMGQQTLLLTHNIDTLGQMSCNPTIGGIGKGHLVKEVDALGGLMAKAIDQAGIQFKILNASKGPAVRATRAQADRVLYRQAVRIALENQPNLMIFQQAVEDLIVENDRVVGAVTQMGLKFRAKAVVLTVGTFLDGKIHIGLDNYSGGRAGDPPSIPLSRRLRELPLRVSRLKTGTPPRIDARTIDFSVLAQQHGDNPMPVFSFMGNAFQHPQQVPCYITHTNEKTHDVIRNNLDRSPMYAGVIEGIGPRYCPSIEDKVMRFADRNQHQIFLEPEGLTSNEIYPNGISTSLPFDVQMQIVRSMQGMENAKIVRPGYAIEYDFFDPRDLKPTLESKFIHGLFFAGQINGTTGYEEAAAQGLLAGLNAARLSADKEGWAPARSQAYLGVLVDDLCTLGTKEPYRMFTSRAEYRLMLREDNADLRLTEMGRELGLVDDERWARFNEKLENIERERQRLKSTWVTPSAESADEVNAHLTTPLSREASGEDLLRRPEMTYAQLTSLAAFAPALEDEQAAEQVEIQVKYEGYIARQQDEIEKQLRNENTLLPATLDYRQVSGLSNEVIAKLNDHKPASIGQASRISGVTPAAISILLVWLKKQGMLRRSA

SEQ ID NO: 76146 - protein, 207 aa, Salmonella typhi
MLNKLSRLLADAGISLTDHQKTLLVAYVDMLHKWNKAYNLTSVRDPNEMLVRHILDSIVVAPYLQGQRFIDVGTGPGLPGIPLAIVLPDAHFTLLDSLGKRVRFLRQVQHELKLENITPVQSRVEAYPSEPPFDGVISRAFASLNDMVSWCHHLPGEKGRFYALKGQLPGDEIASLPDNFSVESVEKLRVPQLEGERHLVIIKSNKV

SEQ ID NO: 76147 - protein, 447 aa, Salmonella typhi; identical to SEQ ID NO: 72927

SEQ ID NO: 76148 - protein, 271 aa, Salmonella typhi; identical to SEQ ID NO: 73388

SEQ ID NO: 76149 - protein, 513 aa, Salmonella typhi
MQLNSTEISELIKQRIAQFNVVSEAHNEGTIVSVSDGVIRIHGLADCMQGEMISLPGNRYAIALNLERDSVGAVVMGPYADLAEGMKVKCTGRILEVPVGRGLLGRVVNTLGAPIDGKGPVDNDGFSAVEAIAPGVIDRQSVDQPVQTGYKAVDSMIPIGRGQRELIIGDRQTGKTALAIDAIINQRDSGIKCIYVAIGQKASTISNVVRKLEEHGALANTIVVVATASESAALQYLAPYAGCAMGEYFRDRGEDALIIYDDLSKQAVAYRQISLLLRRPPGREAFPGDVFYLHSRLLERAARVNADYVEAFTKGEVKGKTGSLTALPIIETQAGDVSAFVPTNVISITDGQIFLESNLFNAGIRPAVNPGISVSRVGGAAQTKIMKKLSGGIRTALAQYRELAAFSQFASDLDDATRKQLDHGQKVTELLKQKQYAPMSVAQQSLVLFAAERGYLADVELAKIGSFEAALLAYVDRDHAPLMQEINQSGGYNDEIEGKLKGILDSFKATQSW

SEQ ID NO: 76150 - protein, 1259 aa, Salmonella typhi
MSLWKKISLGVLIFIVVLLASVAFLVGTTTGLHLVFGAANRWVPGLDIGQVTGGWRDLSLKNIRYEQPGVAVNAGEIHLAVGLDCLWRSSLCVNDLALKDINVAIDSKKMPPSEPAQEEEESGPLNLSTPWPITLSRVALNNINIKIDDTTVSVLDFTYGLAWQEKNLTLKPTRLQGLLIALPKVAEVAQEEVVEPKIEKPQPDEKPLGETLKDLFAKPVMPEMTDVHLPLNLNIESFRGEQLRITGDTDLTVRTMLLKVSSIDGNMKLDTLDIDANQGTVKASGTAQLANNWPVDITLNSTLNIDPLKGEKIKLKVGGALREQLEVRVNLSGPMDVALRAQTRLAEAGLPLNLEVVSQRIAWPLTGDTQFQADDLKLKLSGKMTDYTLSMRTAVKGQDIPPATITLDAKGNERQINLDKLTVAALEGKTELKALVDWQQAISWRGELTLNGINTAKEIPDWPAKLNGVMKTKGSLYGGTWQMDVPELKLTGNVKQNSVNVNGTLKGNSYMQWTIPGLHLALGPNSADIKGELGVKELNLDAAIDAPGLDNALPGLGGMAKGIVKVRGTVEAPQLLADITAHGLRWQELSIAQARIEGDIKSTDQIAGHLNVRVERISQPDVNINLVTLDAKGSEKQHQLQLRVQGEPVSGQLSLTGSFDREEARWKGTLSDTRFQTPVGPWSLTRAIALDYRNKEQEISIGPHCWLNPNAELCIPQTIDAGAAGRALVNLNRFDLAMLKPFMPDTTQASGVFSGKADVSWDTTQEGLPQGKVTLSGRNVKVTQTVNDAPLPVAFETLNLSADLHNNRAELGWLIRLTNNGQFDGQVQVTDPQGRRNLGGNVNMRNLNLAMVNPVFLRGEKAAGMLNARLRLGGDVQSPQLFGQLQLSALDIDGNFMPFEMQPSQLAMNFSGTRSTLAGIVRTQQGQINLNGNADWSQIDNWRARVTAKGSRVRITVPPMVRLDVSPDVVFDATPSLFTLDGRVDVPWARIVVHDLPESAVGVSSDVVMLNNDLQPETPQTASIPINSNLTVHVGNNVRIDAFGLKARLTGDLKVAQDKQGLGLNGQINIPDGRFRAYGQDLLVRKGELLFSGPPDQPLLNIEAIRNPDATEDDVIAGVRVTGTADEPKAEIFSDPAMPQAEALSYLLRGQGLDSNQSDSAAMTSMLIGLGVAQSGQVVGKIGETFGVSNLALDTQGVGDSSQVVVSGYVLPGLQVKYGVGIFDSLATLTLRYRLMPKLYLEAVSGVDQALDLLYQFEF

SEQ ID NO: 76151 - protein, 456 aa, Salmonella typhi
MLNSAMSVVILAAGKGTRMYSDIPKVLHTLAGKPMVQHVIDAATKLGAAQVHLVYGHGGELLKQTLKDDKLNWVLQAEQLGTGHAMQQAAPFFSDDEDILMLYGDVPLISVETLQRLRDAKPQGGIGLLTVKLDDPSGYGRITRENGKVTGIVEHKDATDEQRQIQEINTGILIANGADLKRWLSKLTNNNAQGEYYITDIIALAYQEGREIAAVHPARISETDGVNNRLQLSRLERIYQAEQAEKLLLSGVMLRDPARFDLRGTLYCGMDVEIDANVIIEGYVTLGHRVKIGAGCIIKNSVIGDDCEISPYSVVEDAHLEAACTIGPFARLRPGAELLAGAHVGNFVEMKKARLGKGSKAGHLTYLGDAEIGDNVNIGAGTITCNYDGANKFKTVIGDDVFVGSDTQLVAPVTVGKGATIAAGTTVTRNVADNELVLSRVPQVHKQGWQRPVKKK

SEQ ID NO: 76152 - protein, 609 aa, Salmonella typhi
MCGIVGAIAQRDVAEILLEGLRRLEYRGYDSAGLAVVDAEGHMTRLRRLGKVQMLAQAAEEHPLHGGTGIAHTRWATHGEPSEANAHPHVSEHIVVVHNGIIENHEPLREALKARGYTFVSETDTEVIAHLVNWELKQGGTLRDAILRAIPQLRGAYGTVIMDTRHPDTLLAARSGSPLVIGLGMGENFIASDQLALLPVTRRFIFLEEGDIAEITRRSVNIFDNTGAEVKRQDIESNLQYDAGDKGIYRHYMQKEIYEQPNAIKNTLTGRISHGQVDLSELGPNADDLLSKVEHIQILACGTSYNSGMVSRYWFESLAGIPCDVEIASEFRYRKSAVRRNSLMITLSQSGETADTLAGLRLSKELGYLGSLAICNVPGSSLVRESDLALMTNAGTEIGVASTKAFTTQLTVLLMLVAKLSRLKGLDASIEHDIVHGLQALPSRIEQMLSQDKRIELLAEDFSDKHHALFLGRGDQYPIALEGALKLKEISYIHAEAYAAGELKHGPLALIDADMPVIVVAPNNELLEKLKSNIEEVRARGGQLYVFSDQDAGFVSSDNMHIIEMPHVEEVIAPIFYTVPLQLLAYHVALIKGTDVDQPRNLAKSVTVE

SEQ ID NO: 76153 - protein, 283 aa, Salmonella typhi; identical to SEQ ID NO: 75273

SEQ ID NO: 76154 - protein, 241 aa, Salmonella typhi; identical to SEQ ID NO: 75274

SEQ ID NO: 76155 - protein, 185 aa, Salmonella typhi
MISDIRKDAEVRMEKCVEAFKTQISKVRTGRASPSLLDGIVVEYYGTPTPLRQLASVTVEDSRTLKINVFDRSMGPAVEKAIMASDLGLNPSSAGTDIRVPLPPLTEERRKDLTKIVRGEAEQARVAVRNVRRDANDKVKALLKDKAISEDDDRRSQEEVQKMTDAAIKKVDAALADKEAELMQF

SEQ ID NO: 76156 - protein, 252 aa, Salmonella typhi
MLSATQPVSENLPAHGCRHVAIIMDGNGRWAKKQGKIRAFGHKAGAKSVRRAVSFAANNGIDALTLYAFSSENWNRPAQEVSALMELFVWALDSEVKSLHRHNVRLRIIGDISRFNSRLQERIRKSEALTAHNTGLTLNIAANYGGRWDIVQGVRQLAELVQAGVLRPDQIDEERLGQQICMHELAPVDLVIRTGGEHRISNFLLWQIAYAELYFTDVLWPDFDEQDFEGALHAFANRERRFGGTEPGDDKA

SEQ ID NO: 76157 - protein, 285 aa, Salmonella typhi
MLKYRLISAFVLIPAVIAALFLLPPVGFAIITLVVCMLAAWEWGQLSGFAARSQRVWLAVLCGLLLALMLFLLPEYHHNIRQPLVEMSLWASLGWWVVALLLVLFYPGSAAIWRNSKTLRLIFGLLTIVPFFWGMLALRAWHYDENHYSGAIWLLYVMILVWGADSGAYMFGKLFGKHKLAPKVSPGKTWQGFIGGLATAAVISWGYGMWANLNVAPVILLICSVVAALASVLGDLTESMFKREAGIKDSGHLIPGHGGILDRIDSLTAAVPVFACLLLLVFRTL

SEQ ID NO: 76158 - protein, 341 aa, Salmonella typhi; identical to SEQ ID NO: 75281

SEQ ID NO: 76159 - protein, 183 aa, Salmonella typhi
MTKQPEDWLDDVPGDDIEDEDDEIIWVSKSEIKRDAEELKRLGAELVDLGKNALDKIPLDADLRDAIELAQRIKMEGRRRQLQLIGKMLRQRDVEPIRQALDKLKNRHNQQVVLFHKLEHLRDRLIVEGDDAVAEVLTLWPHADRQQLRSLIRNAKKEKEGNKPPKSARQIFQYLRELAENEG

SEQ ID NO: 76160 - protein, 429 aa, Salmonella typhi
MKTTQTSTIASIDSRSAWRKTDTMWMLGLYGTAIGAGVLFLPINAGVGGMIPLIIMAILAFPMTFFAHRGLTRFVLSGKNPGEDITEVVEEHFGIGAGKLITLLYFFAIYPILLVYSVAITNTVESFLTHQLAINPPPRAILSLILIVGMMTIVRFGEQMIVKAMSILVFPFVAALMLLALYLIPQWNGAALETLSFDSAASTGNGLWMTLWLAIPVMVFSFNHSPIISSFAVAKREEYGEGAEKKCSKILAFAHIMMVLTVMFFVFSCVLSLTPADLAAAKEQNISILSYLANHFNAPIIAWMAPIIAMIAITKSFLGHYLGAREGFNGMVIKSLRGKGKSIEINKLNKITALFMLVTTWIVATLNPSILGMIETLGGPIIAMILFLMPMYAIQKVPAMRKYSGHISNVFVVIMGLIAISAIFYSLFS

SEQ ID NO: 76161 - protein, 455 aa, Salmonella typhi
MISVFDIFKIGIGPSSSHTVGPMKAGKQFTDDLIARHILTDVTRVVVDVYGSLSLTGKGHHTDIAIIMGLAGNLPDTVDIDAIPSFIQDVNTHGRLLLANGQHEVEFPVDKCMNFHADNLSLHENGMRITALAGNKVLYSQTYYSIGGGFIVDEEHFGLTNSEPVNVPYPYKTAADLQRHCQETGLSLSGLMMQNELALHSKEALEQHFAKVWEVMRSGIERGITTEGVLPGKLRVPRRAAALRRMLVSQDKTTTDPMAVVDWINMFALAVNEENAAGGRVVTAPTNGACGIVPAVLAYYDKFIREVNANSLARYMLVASAIGSLYKMNASISGAEVGCQGEVGVACSMAAAGLAELLGGSPAQVCIAAEIAMEHNLGLTCDPVAGQVQVPCIERNAIASVKAVNAARMALRRTSEPRVCLDKVIETMYETGKDMNAKYRETSRGGLAMKIVTCD

SEQ ID NO: 76162 - protein, 457 aa, Salmonella typhi
MTKKIVAVTACPTGVAHAFMAAEALEIEARKRGDWIKVETRGSVGAKNTLTAEEIAQADVVIIAADIELDLSGFVGKRLYRTSTGAALKKSAQEMDNAFNSAEVYQGSAGRSSSAGKTELPGVYKHLMTGVSHMLPLVVAGGLCIALSFVFGIQAFNEPGTLAAALFQIGGKAAFALMVPVLAGFIAFSIADRPGLAPGLIGGMLASLCGAGFLGGIVAGFLAGYSVRFLAQNIKLPASMEALKPVLVLPLLSTLITGLIMIYVVGGPVSAVMEGLTTFLGNMTSTNAILLGMLLGAMQGFDLGGPVNKAAYTFGVGLLASHSYMPMAAIMAAGMVPALGMGVATWAARAKFTASEHEAGNASFILGLCFISEGAIPFAARDPMRVIPSTMVGGAIAGGLSMYFGCTLMAPHGGLFVLAIPHAVEHVMQYLLSIALGTIVCGLMYALLKPSAVAQTV

SEQ ID NO: 76163 - protein, 657 aa, Salmonella typhi
MCVSYSLSSGRVSANHEERDVRFPNQRLAQLFAMLQNETLPQDELAQRLSVSTRTVRADIAALNMLLTPHGAQFTLSRGNGYQLKIDDPARYQSLQTQQSPTLARGPRTSQERIHYLLARFLTSAFSLKLEDLADEWFVSRATLQNDMADVREHLLRYHLTLETRPRHGMKLFGGEMAIRACLTDLLWTLVQQEPSHPLIVSTTLNTEVSQRLQSLLPDIFSHCQIRLTDEGELFLRLYCAVAVRRIREGYPLSECVAEEVDEKVRHAAHEIAELLQQLADKPLSEPEVSWLKVHIAARQVQEIAPSAINADDEEALVHYILNFINTQYNYNLLNDKQLHADLLTHIKTMITRVRYQIMIPNPLLENIKQHYPMAWDMTLAAISSWGKYTPYTISENEIGFLVLHIGVGLERSYNIGYQRQPQVLLVCDAGNAMVRMIEAVLARKYPQIEIARTLTLRDYEARDSMVEDFVISTARIGEKDKPVIMIAPFPTDYQLEQIGKLVLVDRTRPWMLDKYFDASHFRIVEGEINQQTLFKTLCDQLHEEGFVDAAFLDSVIEREAIVSTLLGDGIALPHALGLLAKKTVVYTVLAPQGIAWGDETAHVIFLLAISKSEYEEAMAIYDIFVTFLRERAMTRLCACQNFTQFKTVAMECVSRF

SEQ ID NO: 76164 - protein, 319 aa, Salmonella typhi
MAATKPAFNPPGKKGDMIFSALVKLAALIVLLMLGGIIVSLIISSWPSIQKFGFSFLWTKEWDAPNDIYGALVPIYGTLVTSFIALLIAVPVSFGIALFLTELAPGWLKRPLGIAIELLAAIPSIVYGMWGLFIFAPLFATYFQEPVGNILSNIPFVGALFSGPAFGIGILAAGVILAIMIIPYIAAVMRDVFEQTPVMMKESAYGIGCTTWEVIWRIVLPFTKNGVIGGIMLGLGRALGETMAVTFIIGNTYQLDSASLYMPGNSITSALANEFAEAESGLHVAALMELGLILFVITFIVLAASKFMIMRLAKNEGAR

SEQ ID NO: 76165 - protein, 257 aa, Salmonella typhi
MSMVETAPSKIQVRDLNFYYGKFHALKNINLDIAKNQVTAFIGPSGCGKSTLLRTFNKMYSLYPEQRAEGEILLDGDNILTNTQDIALLRAKVGMVFQKPTPFPMSIYDNIAFGVRLFEKLSRADMDERVQWALTKAALWNETKDKLHQSGYSLSGGQQQRLCIARGIAIRPEVLLLDEPCSALDPISTGRIEELITELKQDYTVVIVTHNMQQAARCSDHTAFMYLGELIEFSNTDDLFTKPAKKQTEDYITGRYG

SEQ ID NO: 76166 - protein, 154 aa, Salmonella typhi
MRYHQYYPVDIVNGPGTRCTLFVSGCVHECPGCYNKSTWRLNSGQPFTKEMEDKIIADLNDTRIHRQGISLSGGDPLHPQNVPDILALVQRIHAECPGKDIWVWTGYRLDELNAAQMQVVNLINVLVDGKFVQDLKDPALIWRGSSNQVVHHLR

SEQ ID NO: 76167 - protein, 151 aa, Salmonella typhi; identical to SEQ ID NO: 72777

SEQ ID NO: 76168 - protein, 382 aa, Salmonella typhi
MAAQRPLTIALVAGETSGDILGAGLIRALKARVPNARFVGVAGPRMQAEGCEAWYEMEELAVMGIVEVLGRLRRLLHIRADLTRRFTELKPDVFVGIDAPDFNITLEGNLKKQGIKTIHYVSPSVWAWRQKRVFKIGRSTHMVLAFLPFEKAFYDKFNVPCRFIGHTMADAMPLDPDKNAARDVLGIPHDAHCLALLPGSRGAEVEMLSADFLKTAQLLRQRYPDLEVVVPLVNAKRREQFEKIKAEVAPDLAVHLLDGMAREAMIASDAALLASGTAALECMLAKCPMVVGYRMKPFTFWLAKRLVKTEYVSLPNLLAGRELVKELLQEECEPQKLAEALLPLLANGKTSHAMHDTFRELHQQIRCNADEQAADAVLELAQ

SEQ ID NO: 76169 - protein, 198 aa, Salmonella typhi; identical to SEQ ID NO: 75291

SEQ ID NO: 76170 - protein, 1160 aa, Salmonella typhi
MSEPRFVHLRVHSDYSMIDGLAKTGPLVKKAASLGMPALAITDFTNLCGLVKFYGAGHGAGIKPIVGADFNVHNELLGDELTHLTVLAANNTGYQNLTLLISKAYQRGYGAAGPIIERDWLVELKEGLILLSGGRMGDVGRCLLRGNQALVEECVAFYEAHFPDRYFLELIRTGRQDEETYLHAAVELAEARGLPVVATNDVRFLESDDFDAHEIRVAIHDGFTLDDPKRPRNYSPQQYMRSEEEMCELFSDIPEALENTVEIAKRCNVTVRLGEYFLPQFPTGDMTTEDYLVKKSKEGLEERLAFLFPDEEERKKRRPEYDERLDIELQVINQMGFPGYFLIVMEFIQWSKDNGVPVGPGRGSGAGSLVAYALKITDLDPLEFDLLFERFLNPERVSMPDFDVDFCMEKRDQVIEHVADMYGRDAVSQIITFGTMAAKAVIRDVGRVLGHPYGFVDRISKLVPPDPGMTLAKAFEAEPQLPEIYEADEEVRALIDMARKLEGVTRNAGKHAGGVVIAPTKITDFAPLYCDEEGKHPVTQFDKSDVEYAGLVKFDFLGLRTLTIINWALEMINKRRAKNGEPPLDIAAIPLDDKKSFDMLQRSETTAVFQLESRGMKDLIKRLQPDCFEDMIALVALFRPGPLQSGMVDNFIDRKHGREELSYPDVQWQHESLKPVLEPTYGIILYQEQVMQIAQVLSGYTLGGADMLRRAMGKKKPEEMAKQRSVFEEGAKKNGIDGELAMKIFDLVEKFAGYGFNKSHSAAYALVSYQTLWLKAHYPAEFMAAVMTADMDNTEKVVGLVDECWRMGLKILPPDINSGLYHFHVNDEGEIVYGIGAIKGVGEGPIEAIIDARNQGGYFRELFDLCARTDTKKLNRRVLEKLIMSGAFDRLGPHRAALMNSLGDALKAADQHAKAEAIGQADMFGVLAEEPEQIEQSYASCQPWPEQVVLDGERETLGLYLTGHPINQYLKEIERYVGGVRLKDMHPTERGKVTTAAGLVIAARVMVTKRGNRIGICTLDDRSGRLEVMLFTDALDKYQQLLEKDRILIVSGQVSFDDFSGGLKMTAREVMDIDEAREKYARGLAISLTDRQIDDQLLNRLRQSLEPHRSGTIPVHLYYQRADARARLRFGATWRVSPSDRLLNDLRGLIGSEQVELEFD

SEQ ID NO: 76171 - protein, 319 aa, Salmonella typhi; identical to SEQ ID NO: 75293

SEQ ID NO: 76172 - protein, 438 aa, Salmonella typhi
MGNTTIQTQSFRAVDAEQSKSKRYIIPFALLCSLFFLWAVANNLNDILLPQFQQAFTLTNFQAGLIQSAFYFGYFVIPIPAGILMKKLSYKAGIITGLFLYAFGAALFWPAAEIMNYTLFLIGLFIIAAGLGCLETAANPFVTALGPESGGHFRLNLAQTFNSFGAIIAVVFGQSLILSNVPHQSQEALDKMTPDQLSAYKHSLVLSVQTPYMIIVAIVLVVALLIMLTKFPALQSDDHSDAKQSSFLSSLSRLIRIRHWRWAVLAQFCYVGAQTACWSYLIRYAIEEIPGMTPGFAANYLTGTMVCFFIGRFTGTWLISRFAPHKVLAAYALLAMLLCLISAFSGGHIGLLALTLCSAFMSIQYPTIFSLGIKNLGQDTKYGSSFIVMTIIGGGIVTPVMGFVSDAAGKIPTAELVPALCFAVIFIFARFRSQAATN

SEQ ID NO: 76173 - protein, 140 aa, Salmonella typhi; identical to SEQ ID NO: 73518

SEQ ID NO: 76174 - protein, 315 aa, Salmonella typhi
MQNRLTIKDIARLSGVGKSTVSRVLNNESGVSKRTRERVEAVMNQHGFSPSRSARAMRGQSDKVVAIIVTRLDSLSENLAVQTMLPAFYEQGYDPIMMESQFSPMLVMEHLGMLRRRNIDGVVLFGFTGITEELIAPWKASLVLLARDAQGFASVCYDDEGAIHILMQRLYEQGHRNISFLGVPHSDITTGKRRHDAYLAFCKKHKLHPVAALPGLAMKQGYEHTASVIMPDTTALVCATDTLALGASKYLQEQRIETLQLASIGNTPLIKFLHPEIVTVDPGYAEAGRQAALQLIEQINGRCDPRRIVIPSTLA

SEQ ID NO: 76175 - protein, 902 aa, Salmonella typhi
MLKTITRQLFARLNRHLPYRLVHRDPLPGAQTAVNATIPPSLSERCLKIAAMEQETLWRVFDTHPEGLNAAEVTRAREKHGENRLPAQKPSPWWVHLWVCYRNPFNILLTILGGISYATEDLFAAGVIALMVGISTLLNFVQEARSTKAADALKAMVSNTATVLRVINENGENAWLELPIDQLVPGDIIKLAAGDMIPADLRIIQARDLFVAQASLTGESLPVEKVATTREPRQNNPLECDTLCFMGTNVVSGTAQAVVMATGADTWFGQLAGRVSEQDNEQNAFQKGISRVSMLLIRFMLVMAPVVLIINGYTKGDWWEAALFALSVAVGLTPEMLPMIVTSTLARGAVKLSKQKVIVKHLDAIQNFGAMDILCTDKTGTLTQDKIMLENHTDISGKPSEHVLHCAWLNSHYQTGLKNLLDTAVLEGVDETAARQLSGRWQKIDEIPFDFERRRMSVVVAEDSNVHQLVCKGALQEILNVCTQVRHNGDIVPLDDNMLRRVKRVTDTLNRQGLRVVAVATKYLPAREGDYQRIDESDLILEGYIAFLDPPKETTAPALKALKASGITVKILTGDSELVAAKVCHEVGLDAGDVVIGSDIEGLSDDALAALAARTTLFARLTPMHKERIVTLLKREGHVVGFMGDGINDAPALRAADIGISVDGAVDIAREAADIILLEKSLMVLEEGVIEGRRTFSNMLKYIKMTASSNFGNVFSVLVASAFLPFLPMLPLHLLIQNLLYDVSQVAIPFDNVDEEQIQKPQRWNPADLGRFMVFFGPISSIFDILTFCLMWWVFHANTPETQTLFQSGWFVVGLLSQTLIVHMIRTRRLPFIQSRAAWPLMAMTLLVMVVGVSLPFSPLASYLQLQALPLSYFPWLIAILAGYMTLTQLVKGFYSRRYGWQ

SEQ ID NO: 76176 - protein, 75 aa, Salmonella typhi; identical to SEQ ID NO: 73515

SEQ ID NO: 76177 - protein, 454 aa, Salmonella typhi
MSHNDTIVAQATPPGRGGVGILRISGLKARDVAQEVLGKLPKPRYADYLPFKDVDGSALDQGIALWFPGPNSFTGEDVLELQGHGGPVILDLLLKRILTLPGVRIARPGEFSERAFLNDKLDLAQAEAIADLIDASSEQAARSALNSLQGAFSARVNHLVEALTHLRIYVEAAIDFPDEEIDFLSDGKIEAQLNGVIADLDAVRTEARQGSLLREGMKVVIAGRPNAGKSSLLNALAGREAAIVTDIAGTTRDVLREHIHIDGMPLHIIDTAGLRDANDEVERIGIERAWQEIEQADRVLFMVDGTTTDAVDPADIWPDFIARLPKNLPITVVRNKADITGETLGISEVNGHSLVRLSARTGEGVDVLRNHLKQSMGFDTNMEGGFLARRRHLQALAEAANHLEQGKAQLLGAWAGELLAEELRLAQQSLSEITGEFTSDDLLGRIFSSFCIGK

SEQ ID NO: 76178 - protein, 548 aa, Salmonella typhi
MDSQRNLLVIALLFVSFMIWQAWEQDKNPQPQTQQTMQTTTTAAGSAADQGVPASGQGKMITVKTDVLDLTINTRGGDVEQALLPAYPKELGSNEPFQLLETTPQFIYQAQSGLTGRDGPDNPANGPRPLYNVEKDAFVLADGQNELQVPMTYTDAAGNTFTKTFVFKRGDYAVNVNYSVQNTGEKPLEVSTFGQLKQSVNLPPHRDTGSSNFALHTFRGAAYSTPDEKYEKYKFDTIADNENLNVSSKGGWVAMLQQYFATAWIPRNDGTNNFYTANLGNGIVAIGYKAQPVLVQPGQTGAMTSTLWVGPEIQDKMAAVAPHLDLTVDYGWLWFISQPLFKLLKWIHSFVGNWGFSIIIITFIVRGIMYPLTKAQYTSMAKMRMLQPKIQAMRERLGDDKQRQSQEMMALYKAEKVNPLGGCFPLIIQMPIFLALYYMLMGSIELRHAPFALWIHDLSAQDPYYILPILMGVTMFFIQKMSPTTVTDPMQQKIMTFMPVIFTVFFLWFPSGLVLYYIVSNLVTIIQQQLIYRGLEKRGLHSREKKKS

SEQ ID NO: 76179 - protein, 466 aa, Salmonella typhi
MSLSLWQQCLARLQDELPATEFSMWIRPLQAELSDNTLALYAPNRFVLDWVRDKYLNNINGLLNTFCGADAPQLRFEVGTKPVTQTLKTPVHNVVAPTQTTTAQPQRVAPAARSGWDNVPAPAEPTYRSNVNVKHTFDNFVEGKSNQLARAAARQVADNPGGAYNPLFLYGGTGLGKTHLLHAVGNGIMARKPNAKVVYMHSERFVQDMVKALQNNAIEEFKRYYRSVDALLIDDIQFFANKERSQEEFFHTFNALLEGNQQIILTSDRYPKEINGVEDRLKSRFGWGLTVAIEPPELETRVAILMKKADENDIRLPGEVAFFIAKRLRSNVRELEGALNRVIANANFTGRAITIDFVREALRDLLALQEKLVTIDNIQKTVAEYYKIKIADLLSKRRSRSVARPRQMAMALAKELTNHSLPEIGDAFGGRDHTTVLHACRKIEQLREESHDIKEDFSNLIRTLSS

SEQ ID NO: 76180 - protein, 430 aa, Salmonella typhi
MTTLTLNTSLLSSRRILAAFSGGLDSTVLLHQLVLWRERHPDVTLRAIHIHHGLSPHADSWVRHCETVCERWQVPLVVERVTLADNGLGIEAHAREARYRAFAQTLLPGEVLATAQHLDDQCETFLLALKRGSGPAGLSAMGERSPFAGTLLLRPLLRETRKTLEQWAVRHGLCWIEDESNQDDAYDRNFLRLRALPLLQQRWPHFPAAVARSATLCAEQERLLDELLASDLTDCITTEGTLRLSPLMSMSDVRRAAILRRWLAMRNAPMPSRDALERIWQEVALARDDASPCLRFGDHEIRRYQSQLWWIKTVAGQHETTVAWPVWQTPLALPAGLGTVQLVPGGELRRPREEESVSIRFKAPGLLHIVGRHGGRKLKKIWQEQGIPPWRRDTTPLLFYGETLIAAAGVFVTREGAAEDKEGVSLVWHA

SEQ ID NO: 76181 - protein, 366 aa, Salmonella typhi
MKFTVEREHLLKPLQQVSGPLGGRPTLPILGNLLLQVADGTLSLTGTDLEMEMVARVTLSQPHEPGATTVPARKFFDICRGLPEGAEIAVQLEGDRMLVRSGRSRFSLSTLPAADFPNLDDWQSEVEFTLPQATMKRLIEATQFSMAHQDVRYYLNGMLFETEGSELRTVATDGHRLAVCSMPLEASLPSHSVIVPRKGVIELMRMLDGGENPLRVQIGSNNIRAHVGDFIFTSKLVDGRFPDYRRVLPKNPDKHLEAGCDILKQAFARAAILSNEKFRGVRLYVSENQLKITANNPEQEEAEEILDVSYGGTEMEIGFNVSYVLDVLNALKCETVRIMLTDSVSSVQIEDAASQSAAYVVMPMRL

SEQ ID NO: 76182 - protein, 310 aa, Salmonella typhi
MENKRTLVVALGGNALLKRGEPLEADIQRKNIELAARTIAQLTRQWRVVLVHGNGPQIGLLALQNSAYANVTPYPLDILGAESQGMIGYMLQQALKNHLPEREISVLLTQVEVDANDPAFLNPTKYIGPIYDEAQARALQAEKGWVFKADGNAFRRVVPSSQPKRIVENDAIRALISRDHLVICNGGGGVPVVEKADGYHGIEAVIDKDLSAALLASQIHADALLILTDVDAVYLDWGKPTQRPLAQVTPELLREMQFDAGSMGPKVTACAEFVSHCCGIAGIGSLADGQAILAGEKGTLIRCETADVDA

SEQ ID NO: 76183 - protein, 417 aa, Salmonella typhi
MSGANSAISRRRLLQGAGAMWLLSVSQVGLAAVSQVVAVRIWPASSYTRVTVESNRLLKYKQFALSNPDRVVVDIEDVNLNSVLKGIGAQIRSDDPYIKSARVGQFDPKTVRMVFELKQNVKPQLFALAPVAGFKERLVIDLYPANAQDMQDPLLALLEDYNKGDLDKQVPPSQSGPQPGKAGRDRPIVIMLDPGHGGEDPGAIGKYKTREKDVVLQIARRLRALIEKEGNMKVYMTRNEDIFIPLKVRVAKAQKQRADLFVSIHADAFTSRQPSGSSVFALSTKGATSTAAKYLAQTQNASDLIGGVSKSGDRYVDHTMFDMVQSLTIADSLKFGKAVLKQLGKINDLHKNKVEQAGFAVLKAPDIPSILVETAFISNIEEERKLKTATFQQQVAESILAGIKAYFADGATLARRS

SEQ ID NO: 76184 - protein, 804 aa, Salmonella typhi [sequence omitted]

SEQ ID NO: 76185 - protein, 270 aa, Salmonella typhi
MAIKLIAIDMDGTLLLPDHTISPAVKNAIAAAREKGVNVVLTTGRPYAGVHSYLKELHMEQPGDYCITYNGALVQKAGDGSTVAQTALSYDDYRYLEKLSREVGSHFHALDRNTLYTANRDISYYTVHESYVATIPLVFCEAEKMDPNTQFLKVMMIDEPAVLDRAIARIPAEVKEKYTVLKSAPYFLEILDKRVNKGTGVKSLAEALGIKPEEVMAIGDQENDIAMIEYAGMGVAMDNAIPSVKEVANFVTKSNLEDGVAWAIEQHVLS

SEQ ID NO: 76186 - protein, 611 aa, Salmonella typhi
MTIQKRLLEAVEQKLLRPIDAQFALTVAGNDDPAVTLAAALLSHDAGEGHVCLPLSRLTLTEEAHPLLVAWISETATPIDWKKRLLASAAVSCGDSPAPLILCGDRLYLNRMWCNERTVARFFNEVNQAIAVDEDQLSRILDALFPPTDEVNWQKVAAAVALTRRISVISGGPGTGKTTTVAKLLAALIQMADGERCRIRLAAPTGKAAARLTESLGAALRQLPLTDAQKKRIPEDASTLHRLLGAQPGSQRLRHHAGNPLHLDVLVVDEASMIDLPMMSRLIDALPPHGRVIFLGDRDQLASVEAGAVLGDICAYVNAGFTAERARQLSRLTGSAIPAGAGTQAASLRDSLCLLQKSYRFGSDSGIGKLAAAINCGDRSAIQAVFQQGFSDIEKRTLQSSDDYAGMLDEALAGYGRYLRLLHEKAAPEAILQAFNEYQLLCALREGPFGVRGLNDRIEQAMVQQRKIQRHPHSRWYEGRPVMIARNDSALGLFNGDIGIALDRGQGLRVWFVMPDGTIKSVQPSRLPEHDTTWAMTVHKSQGSEFDHAALILPSQRSPVVTRELVYTAVTRARRRLSLYADERILAGAIVTRTERRSGLATLFDEVSRIG

SEQ ID NO: 76187 - protein, 334 aa, Salmonella typhi
MSTFYQKPFLKLLDFTASELTALLQLAAKLKADKKNGKEEQKLVGKNIALIFEKDSTRTRCSFEVAAYDQGARVTYLGSSGSQIGHKESIKDTARVLGRMFDGIQYRGYGQEIVETLAEYSGVPVWNGLTDEYHPTQLLADLLTMQEHLPGKAFNEMTLVYAGDARNNMGNSMLEAAALTGLDLRLVAPKACWPQAALVAECSAMAKKNGGAITLTEDIASGVKGADFIYTDVWVSMGEPKEKWAERIALLRDYQVNSQMMALTGNPQVKFLHCLPAFHDDETTLGKKMAEEYGLHGGMEVTDEVFESAASIAFDEAENRMHTIKAVMVATLSK

SEQ ID NO: 76188 - protein, 254 aa, Salmonella typhi
MNYPQILSPVLNFLHCPTPQAWIVQARDPQNLPLLLTDHLICELKAAQTALLLVRKYVADKSGADALLAWLQPYEAFAFRQGPEPDFVALHKQISKSAMPQTDDPWGRQLIDRMVLLIKEELHHFWQVREVMQARNIPYVKITASRYAKGMLKAVRTHEPLTLIDKLICGAYIEARSCERFAALAPWLDEDLQTFYLSLLRSEARHYQDYLALAQQISAEDISARVRYFGDVEADLILSPDREFRFHSGVPAAG

SEQ ID NO: 76189 - protein, 911 aa, Salmonella typhi
MSTPSLTHRLWLAFALMAALTLLSTVIGWISLRVISQVEQTNTQALLPTMNMARQLSEASAYELFSAQNLTNADSEGVWLAQGKMLKAQSLKINHLLQALSEQGFNTSAIARQEKEIAQTLGQQGTLVGEILTLRAQQQQLSRQIAEAAESIAAQAHGQANNAATSAGATQAGIYDLIESGKGDQAERALDRLIDIDLEYVNQMNELRVNALRFKQLIVTLKDAQGLSDAEETDEKLNQLVKILSRRQQRIEDPTVRAQIADALGKINQYTTLVTLFRKENAIRDQLQTLMANNLFQFTRFSTEVSQLVNAIEKRNEAGLARLTHASQRGQIGLVILGILALCSLSFILWRVVYRSVSRPLAQQTQALQRLLEGDIDSPFPEAAGVSELDTISRLMEAFRANVRKLNRHREDLAEQVRSQTAELHALVLEHRQARAEAEKANEAKSTFLAAMSHEIRTPLYGILGTVQLLADKPLMANYRDDLQAINDSGESLLAILNDILDYSAIEVGGTNVSISEEPFEPRQLLNSALHLMHSRVQVALITDFSEQLPSTLQGDPRRIRQIVINLLSNAAKFTDRGSIVLRTFCDDQSWFIEVEDTGCGIPEAKLTAIFKPFVQATGCRGGTGLGLAISASLAEAMGGTLTVTSTLHVGSCFRLQLPVRHPKPASKSAFREPVNLNGLRLLLIEDNMLTQRITAEMLTGKGVKVSVAESANDALRCLAEGEPFDVALVDFDLPDYDGLTLAQQLMSLYPAMKRIGFSAHVIDDNLRQRTAGLFCGIIQKPVPREELYRMIAHYLQGKSHNARVMLNEHQLAGDMASVGPEKLRQWVALFKDSALPLVEEIEAARAMNDDVNIKRLAHKLKSGCASLGMTQATEACRELELQPLSDIDIKTIVTQGVTALDAWIAGHPSP

SEQ ID NO: 76190 - protein, 171 aa, Salmonella typhi
MSHIMNNVASPTLTVHRITTADNAAIARVIRQVSAEYGLTADKGYTVADPNLDELYQVYSQPGAAYWVVEQNGCVVGGGGVAPLSCSEPDICELQKMYFLPVIRGQGLAKKLALMALDHAREQGFKRCYLETTAFLREAIALYERLGFEHISEPLGCTGHVDCEVRMLKDL

SEQ ID NO: 76191 - protein, 346 aa, Salmonella typhi
MRTLISFFFLIIIVSNVETASAETGLLHWTRADRAIPWRQTSVNASKPWKLCALYPSLKDSYWLSVNYGMQKAAKLYGVDLKVLEANGYRQLATQQQQMTQCREWGADAILLGSSTDRFPELERYAGNVPVIELVNMIHDASVATRIGLPWFQMGYLPGRFLVQWSKGKTLNVLLFPGPEEAGGSQEMVAGFRQAIKGSAINIVDIAWGDNDIEVQRNLLQEMLERHPDANVVAGSAIAAEAAMGEGRNLTTPLTIVSFYLTHQVYRGLKRGHILMALSDQMAWQGELAITQSIKVLQGQPVPENISPPVLILTHNNADSARVRRSLSPPGFRPVYLYQYTSEAKK

SEQ ID NO: 76192 - protein, 395 aa, Salmonella typhi
MNNVISSKDNHNHTLVFTGKGGKYFVICLVNFLLTCITFGIYAPWAMVKCRRYIYTNMTLNNQPFAYKATGGALFISVLLVFIIYIVSLSFIEHGHPGLGFTLFGLLIAIIPFMAVKGLQYQAMMTSLNGVHFGFQCSMRRAWWYMFALPVLLMVALYIVLYIISLVTIAVGGLVFNIVFLGLLAIIGIGVINGITYSKWMTLFGNGANFGIHRFSIQVNVKTCIRGCVLAMLTLFPFAVVIGYLIAPVFTDMILLSMMGNAQAGGALILQYYGQIMACYFLYFLAIIVVTSYLYVALRNLFLNNLSLANDSIRFHSSVTAHGMLWRLLVVFVISGVTLGLAYPWLKIWLVSWLAQNTQVQGDLDSLELTNDEKPLENSPLMWISRGIMPYFPFI

SEQ ID NO: 76193 - protein, 572 aa, Salmonella typhi
MRTSQYLLSTLKETPADAEVISHQLMLRAGMIRKLASGLYTWLPTGLRVLKKVENIVREEMNNAGAIEVSMPVVQPADLWQESGRWEQYGPELLRFVDRGERPFVLGPTHEEVITDLVRNELSSYKQLPLNFFQIQTKFRDEVRPRFGVMRSREFLMKDAYSFHTSQESLQETYDAMYAAYSRIFSRMGLDFRAVQADTGSIGGNASHEFQVLAQSGEDDIVFSDVSDYAANIELAEAIAPQTPRAAATQEMTLVDTPNAKTIAELVEQFNLPIEKTVKTLLVKAVKDSKSPLVALLVRGDHELNEVKAEKLPHVASPLTFATEEEIRAVINAGPGSLGPVNMPIPVIIDRTVAAMSDFAAGANIDGKHYFGINWDRDVATPVVADIRNVVAGDPSPDGQGTLLIKRGIEVGHIFQLGTKYSEALKASVQGEDGRNQILTMGCYGIGVTRVVAAAIEQNFDERGIVWPDAIAPFQVAILPMNMHKSFRVQELAEKLYSELRAQGIEVLMDDRKERPGVMFADMELIGIPHTIVIGDRNLDNDDIEYKYRRSGEKSLIKTGDIVDYLVKAIKG

SEQ ID NO: 76194 - protein, 235 aa, Salmonella typhi
MSSFQFDQIGVIRSPYKEKFAVPRQPGLVKSACGELHLIAPYNQADAVRGLEAFSHLWVLFVFHQTMDGGWRPTVRPPRLGGNARMGVFATRSTFRPNPIGMSLVALKGIECRKESVILKLGSLDLVDGTPVVDIKPYLPFAEALPDAAASYAQQAPIAEMPVSFTAEVAQQLTTLERRYPQLRTFICDVLAQDPRPAYRKGEETGKTYAVWLHDFNVRWRVVNTGFEVFALEPR

SEQ ID NO: 76195 - protein, 271 aa, Salmonella typhi
MAFKFKTFAAVGALIGSLALAGCGQDEKDPNHIKVGVIVGAEQQVAEVAQKVAKEKYGLDVELVTFNDYVLPNEALSKGDIDANAFQHKPYLDQQIKDRGYKLVSVGKTFVYPIAGYSKKIKSLDELKDGSQVAVPNDPTNLGRSLLLLQKVGLIKLKDGVSLLPTSLDIVENPKNLKIVELEAPQLPRSLDDAQIALAVINTTYASQIGLTPAKDGIFVEDKDSPYVNLIVTREDNKDAENVKKFVQAYQSDEVYEAANKVFNGGAVKGW

SEQ ID NO: 76196 - protein, 212 aa, Salmonella typhi
MWLLVRGVWETLAMTFVSGFFGFVIGLPVGVLLYVTRPGQIMENARLYRSLSAVVNIFRSIPFIILLVWMIPFTRIIVGTSIGLQAAIVPLTVGAAPFIARIVENALLEIPAGLIEASRAMGATPLQIVRKILLPEALPGLVNAATITLITLVGYSAMGGAVGAGGLGQIGYQYGYIGYNATVMNTVLVLLVVLVYLIQLSGDRIVRAVTHK

SEQ ID NO: 76197 - protein, 951 aa, Salmonella typhi
MEKTYNPQDIEQPLYEHWEKQGYFKPNGDESKESFCIMIPPPNVTGSLHMGHAFQQTIMDTMIRYQRMQGKNTLWQVGTDHAGIATQMVVERKIAAEEGKTRHDYGRDAFIDKIWQWKAESGGTITRQMRRLGNSVDWERERFTMDEGLSNAVKEVFVRLYKEDLIYRGKRLVNWDPKLRTAISDLEVENRESKGSMWHIRYPLADGAKTADGKDYLVVATTRPETVLGDTGVAVNPEDPRYKDLIGKFVILPLVNRRIPIVGDEHADMEKGTGCVKITPAHDFNDYEVGKRHALPMINILTFDGDIRESAEVFDTKGEESNVYSSEIPAEFQKLERFAARKAIVAAVDALGLLEEIKPHDLTVPYGDRGGVVIEPMLTDQWYVRADVLAKPAVEAVENGDIQFVPKQYENMYFSWMRDIQDWCISRQLWWGHRIPAWYDNDGNVYVGRTEDEVRQENNLGADVQLRQDEDVLDTWFSSALWTFSTLGWPENTDALRQFHPTSVMVSGFDIIFFWIARMIMMTMHFIKDENGKPQVPFHTVYMTGLIRDDEGQKMSKSKGNVIDPLDMVDGISLPELLEKRTGNMMQPQMAEKIRKRTEKQFPNGIEPHGTDALRFTLAALASTGRDINWDMKRLEGYRNFCNKLWNASRFVLMNTEEQDCGFNGGEMTLSLADRWILAEFNQTVKAYREALDNFRFDIAAGILYEFTWNQFCDWYLELTKPVMTGGSESELRGTRHTLVTVLEGLLRLAHPIIPFITETIWQRVKVICGITADTIMLQPFPEYNAAQVDEAALADTEWLKQAIVAVRNIRAEMNIAPGKPLELLLRGCSEEAVRRVNDNRSFLLNLARLESITVLPADDKGPVSMTKIIDGAELLIPMAGLINKEDELARLAKEVAKIEGEIARIEGKLSNEGFVARAPEAVIAKEREKLDGYAEAKAKLIEQQAVISAL

SEQ ID NO: 76198 - protein, 160 aa, Salmonella typhi
MATHLNPPQEASYMKNATFYLLDNDTTVNGLSAVEQLVCEIAAERWRAGKRVLIACEDEKQAIRLDEALWARPAESFVPHNLAGEGPRGGAPVEIAWPQKRNSSPRDILISLRTSFADFATAFTEVVDFVPYEETLKQLARERYKAYRVAGFNLNTATWK

SEQ ID NO: 76199 - protein, 156 aa, Salmonella typhi; identical to SEQ ID NO: 73598

SEQ ID NO: 76200 - protein, 503 aa, Salmonella typhi
MEFSVKSGSPEKQRSACIVVGVFEPRRLSPIAEQLDKISDGYISALLRRGELEGKPGQTLLLHHVPNVLSERILLIGCGKERELDERQYKQVIQKTINTLNDTGSMEAVCFLTELHVKGRNNYWKVRQAVETAKETLYSFDQLKTNKSEPRRPLRKMVFNVPTRRELTSGERAIQHGLAIAAGIKAAKDLGNMPPNICNAAYLASQARQLADSYSKNVITRVIGEQQMRELGMNAYLAVGHGSQNESLMSVIEYKGNPSEDARPIVLVGKGLTFDSGGISIKPSEGMDEMKYDMCGAAAVYGVMRMVAELKLPINVIGVLAGCENMPGGRAYRPGDVLTTMSDQTVEVLNTDAEGRLVLCDVLTYVERFEPEAVIDVATLTGACVIALGHHITGLMSNHNPLAHELIGASEQAGDRAWRLPLGDEFQEQLESNFADMANIGGRPGGAITAGCFLSRFTRKYNWAHLDIAGTAWRSGKAKGATGRPVALLSQFLLNRAGFNGEE

SEQ ID NO: 76201 - protein, 264 aa, Salmonella typhi
MKQYLELIQKVLDEGTQKNDRTGTGTLSIFGHQMRFNLLEGFPLVTTKRCHLRSIIHELLWFLQGDTNIAYLHENNVTIWDEWADENGDLGPVYGKQWRAWPTPDGRHIDQIATVLSQLKNDPDSRRIIVSAWNVGELDKMALAPCHAFFQFYVADGKLSCQLYQRSCDVFLGLPFNIASYALLVHMMAQQCDLDVGDFVWTGGDTHLYSNHMEQTHLQLSREPRALPKLVIKRKPDSLFDYRFDDFEIEGYDPHPGIKAPVAI

SEQ ID NO: 76202 - protein, 219 aa, Salmonella typhi
MMWRVFCLELRVAFRHGADIAGPLWFFLMVITLFPLSVGPQPQLLARIAPGIIQVAALLASLLALERLFRDDLQDGSLEQLMLLPVPLPAVVLAKVLAHWAVTGLPLMMLSPLVALLLGMDVYGWKIMALTLLLGTPALGFLAAPGVGLTAGLRRGGVLLGILVLPLSVPVLIFATAAMDAASMHLPVDGYLAVLGALLAGSATLSPFATAAALRISTQ

SEQ ID NO: 76203 - protein, 748 aa, Salmonella typhi
MLTRLREIVEKVASAPRLNEALNILVTDICLAMDTEVCSVYLADHDRRCYYLMATRGLKKPRGRTVALAFDEGIVGLVGRLAEPINLADAQKHPSFKYIPSVKEERFRAFLGVPIIQRRQLLGVLVVQQRELRQYDESEESFLVTLATQMAAILSQSQVTALFGQYRQTRIRALPAAPGVAIATGWQDATMPLMEQVYEASTLDTSLERERLTGALEEAANEFRRYSKRFAAGAQKETAAIFDLYSHLLSDARLRRELFAEVDKGAVAEWAVKKIIEKFAEQFAALTDNYLKERAGDLRTLGQRLLFHLDDSVQGPNAWPERFILVADELSATTLAELPQDRLAGVVVRDGAANSHAAIMVRALGIPTVMGADIQPSVLHRRTLVVDGYRGELLVDPEPVLIQEYQRLISEEIELSRLAEDDVNLPAQLKSGERIKVMLNAGLSPEHEEKLGSRIDGIGLYRTEIPFMLQSGFPSEEEQVAQYQGMLQMFNDKPVTLRTLDVGADKQLPYMPISEENPCLGWRGIRITLDQPEIFLIQVRAMLRANAATGNLSILLPMVTSIDEVDEARRLIERAGREVEEMIGYAIPKPRIGIMLEVPSMVFMLPHLANRIDFISVGTNDLTQYILAVDRNNTRVASIYDSLHPAMLRALSMIAQEAEKHGLDLRLCGEMAGDPMCVAILIGLGYRHLSMNGRSVARVKYLLRHIDFEDAQTLARRSLEAQMATEVRHQVAAFMERRGMGGLIRGGL

SEQ ID NO: 76204 - protein, 421 aa, Salmonella typhi
MKLNARQVETAKPKDKTYKMADGGGLYLEVSAKGSKYWRMKYRRPSDKKEDRLAFGVWPTVTLAQARAKRDEAKKLLVQGIDPKTEQKEAQAENSGAYTFETIAREWHASNKRWSEDHRSRVLRYLELYIFPHIGSSDIRQLKTSHLLAPIKKVDASGKHDVAQRLQQRVTAIMRYAVQNDYIDSNPASDMAGALSTTKARHYPALPSSRFPEFLARLAAYRGRVMTRIAVELSLLTFVRSSELRFARWDEFDFDKSLWRVPAKREEIKGVRYSYRGMKMKEEHIVPLSRQAMVLLEQLKQISGDKELLFPGDHDATKVMSENTVNSALRAMGYDTKTEVCGHGFRTMARGALGESGLWSDDAIERQLSHSERNNVRAAYIHTSEHLDERRLMVQWWADYLDIIQYEHITPYEYARVCNIK

SEQ ID NO: 76205 - protein, 267 aa, Salmonella typhi
MTIPAFGLGTFRLKDDVVIASVKTALELGYRAVDTAQIYDNEAAVGQAIAESGVPRNELYITTKIWIENLSKDKLIPSLKESLKKLRTDYVDLTLIHWPSPGDAVSVEEFMQALLEAKKQGLTREIGISNFTIPLMEKAIAAVGADHIATNQIELSPYLQNRKVVDWAKAHGIHITSYMTLAYGKALKDEVIARIAVKHNATPVQVILAWAMGEGYSVIPSSTRRENLASNLLAQDLHLDAEDKNAIAALDCNDRLVSPEGLAPAWD

SEQ ID NO: 76206 - protein, 231 aa, Salmonella typhi
MSALCPLLTPPASEALLLAQARQLSGYTLGELAVMAGITTPKDLKRDKGWIGVLLEIWLGASAGSKPEQDFAALGVELKTIPVDSLGRPLETTFVCVAPLTGNSGVTWETSHVRHKLKRVLWVPVEGDRSIPLAERRVGSPLLWSPSEEEDRQLRLDWEELMDMIVLGQVERITARHGEVLQLRPKAANARALTEAIGARGEPILTLPRGFYLKKNFTQALLARHFLLQNP

SEQ ID NO: 76207 - protein, 142 aa, Salmonella typhi
MRNYDLSPLLRQWIGFDKLANALQNSGESQSFPPYNIEKSDDNHYRITLALAGFRQEDLDIQLEGTRLTVKGTPEQPENEPKWLHQGLVMQPFSLSFTLAENMEVSGATFTNGLLYIDLTRNEPETIPPQRIAINERSALNS

SEQ ID NO: 76208 - protein, 340 aa, Salmonella typhi
MMATMLDVSRHAGVSKATVSRVLNGTGQVKESTRQKVFTAMQALDYRPNLLARSLANRTSNSIGLVVSTFDGFYFGSLLRRASRQAEFHNKQLIVTDGHDTPEREQKAVQMLADRQCDAIILYTRYMDEPTILSLIDATEMPLVIINRNITQAHDRAIFFEQETAAFQAVEYLITQGHRDIACITLPVHTPTGTSRVAGYRKALEKYGIPWQPAKVKYGDYTLTRGYDACRELLEEGVTFSALFACNDDTALGAAKALRQAGLRIPQDVSLFGFDDAPGATWLEPGLSTVYLPIEDMIATAIDQAVRLANSEPVAPIPPFTGTLILRESVAAGPFFQRPV

SEQ ID NO: 76209 - protein, 394 aa, Salmonella typhi
MKRQRNVNLLLMLVLLVAVGQMAQTIYIPAIADMAQALNVREGAVQSVMAAYLLTYGVSQLFYGPLSDRVGRRPVILVGMSIFMVATLIAMTTHSLTVLIAASAMQGMGTGVGGVMARTLPRDLYEGTQLRHANSLLNMGILVSPLLAPLIGGLLDTLWNWRACYAFLLVLCAGVTFSMARWMPETRPAGAPRTRLIASYKTLFGNGAFNCYLLMLIGGLAGIAVFEACSGVLMGAVLGLSSMVVSILFILPIPAAFFGAWFAGRPNKRFSALMWQSVICCLLAGLMMWIPGWFGVMNVWTLLIPAALFFFGAGMLFPLATSGAMEPFPFLAGTAGALVGGLQNIGSGVLAWLSAMLPQTGQGSLGLLMTLMGLLILACWLPLASRISHQGQTV

SEQ ID NO: 76210 - protein, 392 aa, Salmonella typhi
MKEVVIVGALRTPIGCFQGTLARHSAVELGSMVVKALIERTGVDANAIDEVILGQVLTAGAGQNPARQSAIKGGLPTTVSAITINDVCGSGLKALHLATQAIQCGEADIVIAGGQENMSRAPHVLNDSRTGALPDADNLVDSLVHDGLWDAFNDYHIGVTAENLAREYGISRELQDAYALSSQQKARAAIDTGRFKDEIVPIVTQRNGQTAIVDTDEQPRADASAEGLALLHPAFDSLGSVTAGNASSINDGAAAVMMMSETKAQALGLPVLARIRAFASVGVDPALMGIAPVYATRRCLERAGWQLTEVDLIEANEAFAAQALSVGKMLEWDERRVNVNGGAIALGHPIGASGCRILVSLVHEMVKRDARKGLATLCIGGGQGVALTIERD

SEQ ID NO: 76211 - protein, 90 aa, Salmonella typhi
MSHTIRDKQKLKARTSKIQGQVIALKKMLDEPHECAAVLQQIAAIRGAVNGLMREVIKGHLTEHIVHQSDEARREEDLDVILKVLDSYIK

SEQ ID NO: 76212 - protein, 729 aa, Salmonella typhi
MSFVSTNNKSGMGGLTTTTPPITGESGGVTADSVAGSVADAAEAAVEQAAGSLFGALPEPSGLVKAAVAAAQAAAAAGMAQDAVSAIVSAVAGGPGAHNVTVSGSAVPPGALLFASLDGGETLSELFSYVVQLKTPDTLNLGYVSPAANLPLKPMVGKDLCVNIELDGGGKRHISGLVTAARVVGHEGRSVTYELRMEPWVKLLTHTSDYKAFQNKTVVDILDEVLAEYPYPVEKRLVESYPVRTWQVQYGETDFDFLQRLMQEWGIYWWFEHSEDSHTLVLADAISAHKACPDSPLVEWHQEGLKLDKEFIHTITANESLRTGQWVLDDFDFTKPRSLLANTVANPRETGHATYEHYEWPGDYFDKSEGEMLTRIRMEAQRSPGSRVLGGGNIRTLMTGYTFTLENYPTAEVNQEYLLMQTLLFVQDNAQHSGQDQHFTFSTRFELHPTREVFRPQRTVSKPHTKGPQSAIVTGPAGQEIWTDQYGRVKVQFGWDRYGKMDENSSCWIRVSYPWAGKGFGMIQIPRIGQEVLVDFKNGDPDLPIIVGRTYNQDTMPPWGLPGMASQSGIFSHSLYGGPTNGNMLRFDDKTGAEEVKFHAEKDLNTTVKNNETHTVMVDRTKTIIKNETNSIGEDRNTTVTKNDGLSVKLAQTINIGTTYRLDVGDQFTLRCGNAALVLHKDGSIEFCGKQLMLHTSDVMQLIGKGIDMNPDGGTAVTADDIAPLPTSE

SEQ ID NO: 76213 - protein, 1354 aa, Salmonella typhi
MYEAARVDDPIYHTSALAGFLIGAIIGIAIIALAAFAFFSCGFLAGLILGFMADQIASGVLQLGEAIGRSIHHTAGKILTGSENVSTNSRPAARAVLSTVKCDNHIAEKRIAQGSGNIYINSQPAARKDDHTECDAVVEDGSPNVFLGGGTQTVLEISSEIPDWLRKVVDVLFVVASLLGGLAGAWRQAAKLGTKFGTKCAAKFIGGELTGMAVSEAISGLFSNPVDVTTGQKILLPETDFTLPGRLPVTCSRFYASHLETVGLLGQGWRLNWETSLREDDEHITLTGVQGRELRYPKMMLTPGHQIFGPKEQLYLSRLHDGRYVLHYTDRSYYVFGDFDSDGMAYLLFMETPHRQRIVFGHEGGRLVRIASSSGHHLLLHRTQTPAGERLSRIELVQGGTCGNLVEYRYDDNGQLTGVVNRAGTQVRQFAYENGLMTAHSNAAGFTCRYRWQELDGAPRVTEHDTSDGEHYRFDYDFAAGTTTVTGRQGESWQWWYDRETYITAHRTPGGGMYRFTYNEDHFPVNIGLPGGRTVAYEYDIQNRVVKTTDPEGRVTQTQWNGEFDEITRTALDDDAVWKTQYNAHGQPVQETDPEGRVTQYAYDEQGQMCSRTDAAGGTVVTAFDSRGQMTRYTDCSGRSTGYDHDEDGNLTRVTDAEGKVVRISYNRLGLPETVNSPGKQQDRYTWNALGLMSSHRRITGSVESWRYTPRGLLAAHTDEEKRETRWQYTPEGRVTALTNGNGAQYRFSHDADGRLMREVRPDGLSRTFILDDSGYLTAIQTTGTQGGVRRETQQRDALGRLLRTENEHGQRTFSYNRLDQITAVTLTPTEAGQQQHRMQADTVRFEYDRSGWLTAEHAGNGSICYQRDALGNPTDITLPDGQHLTHLYYGSGHLLQTALDGLTVSEYERDSLHRQIMRTQGQLATYSGYDDDGLLSWQRSLAPGSAPVLPGQRPARQGCVTSRDYYWNNHGEVGTIDDGLRGSVVYSYDRSGYLTGRSGQMYDHDRYYYDKAGNLLDNEGQGPVMNNRLPGCGRDRYGYNEWGELTTRRDQQLEWNAQGQLTRVISGNTETHYGYDALGRRIRKATYGRHTGHTARSRTDFVWEGFRLLQENVQQQGWRTYVYDAEQPYTPVASVTGRGESRQVWYYHTDVTGTPQEVTAADGTLVWAGYIRGFGENAADISNSGAYFHQPLRLPGQYFDDETGLHYNLFRYYAPECGRFVSQDPIGLRGGLNLYAYCPNPLTWIDPLGLDLHHIIPQEVWKTFKTDLKKVTGYVQNVTKKAMDVTNLIDLDKPFHGNHPAYSAYVKDKISELIKNKKLSLTELRNLQDELRSKINAAKASGKNLNDYFKGGC

SEQ ID NO: 76214 - protein, 843 aa, Salmonella typhi
MTMHREPGGERYYYTWAWFEGPDDAAWRVTGHHTDSGEQYRLDWNLAERSLCVTDSMGRTRCHWWDAQGLVTAYRDEAGQMTTFRWSDEERLLLGMTDAQGGKWRYVYDRLGHLTETHDPLGRVEQTQWHPVWHQPETEVDAAGVAWRYEYDERGNLQAVSDPLHQRTVYGYDRHGQVVRITDARGGDKYLQWNEDGQLMRHTDCSGSQTAWFYDERTRLERVTDAESNSTRYSYDGNGHLTEVMFADGRTERYQPDAAGRLVKYTSPAGQITRWQRDGQGRVRRQTDATGRRTAYEYDAYGRLTTLTNENGESYRFRYDVLDRVTEQTDPGGSRRAYGYNALNAVTAVIYGGERGGEIRHGLERDAAGRLTAKITPETRTEYRYDAADRLLEIRRRRHDAAEGGEPEVIRFSYDSAGNLLSEETAQGVLQHRYDVQGNRTETQMPDGRTLRYLYYGSGHLQQINLGRDVISEFTRDHLHREVQRSQGRLDMRRMYDRTGRLTRKLTCKGMRGVVPETFIDREYAYSGQDELLKKRHSRQGVTDYFYDTTGRITACRNEAYLDSWQYDAAANLLDRRQGETAQAGAGSVVPFNRITSYRGLHYRYDEYGRVVEKRGRNGTQHYRWDAEHRLTEVAVTRGGTVRRYGYVYDAPGRRVEKHELDAEGKPYNRTTFLWDGMRLAQECRLGRSSSLYIYSDRGSHEPLARVDRAAPGEADEVLYYHTDVNGAPEEMTDGGGNIVWEAGYQVWGNLTHEKETRPVQQNLRFQGQYLDRETGLHYNLYRFYDPDIGKFISGDPIGLAGGINLYQYAPNPLSYIDPLGLCKKFAGKGSPAERARNYRSTG

SEQ ID NO: 76215 - protein, 193 aa, Salmonella typhi
MRNKIILAMAAAGMMYGASVYAVDPPTAGPFGSGKITFTGTITNSPCDIAPGDDAITVPFGQISYRKLNTADATTDSKPFTIHLQNCAFDPNIPDTAGSAGKMSKVTVSFSGGANVAKKAYTTSGSAQHVGVQLLKSDNTAIIEPNTQMPEDDAQQLQAGNNELNFYARLIALDNGVTPGDFTASVTYTLKYL

SEQ ID NO: 76216 - protein, 500 aa, Salmonella typhi
MNTFFSRLITVVACFFIFSAAWFCLWSISLHLVERPELAALLFPFGLRLGLMLQCPRGYWPVLLGAEWLLVYWLAQEVALAHLPLLMIGGVLTLLPVALTSRYRHQRDWRTLLLQGAALTAAALLQSLPWLGQGEAAWNALLLTLTGGLTLAPICLVFWHYLTSTTWLPLGPSLVSQPVNWRGRHLIWYLLLFIVSLWLQLGLPAELSRFTPFCLALPIIALAWHYGWQGALIATLMNAIALIASQTWHDHPVDLLLSLLAQSLTGLLLGAGIQRLRELNQSLQKELARNHRLAERLLETEESVRRDVARELHDDIGQTITAIRTLAGIVQRLAADNGGVKQSGQLIEQLSLGVYDAVRRLLGRLRPRQLDDLTLAQAIRSLLREMELESRGIVSHLDWRIDETALSESQRVTLFRVCQEGLNNIVKHANASAVTLQGWQQDERLMLVIEDDGSGLPPGSHQQGFGLTGMRERVSALGGTLTISCTHGTRVSVSLPQRYV

SEQ ID NO: 76217 - protein, 247 aa, Salmonella typhi; identical to SEQ ID NO: 73425

SEQ ID NO: 76218 - protein, 273 aa, Salmonella typhi
MSYARHLPVLMYHHVSDKPGQITLSPRTFRAQMKWLAESGWKTVTAAAVEAFYHGARLPRKSVMLTFDGGWLDNWLQVFPVLQEFNLHAHLFLVTSLISDGPVRIPAGEPVYSHDECQMLVKQGRVDEVMLRWSEVREMHLSGLVEFHSHTHTHRRWDQKPVSRNPSDLLRVDILLSRKRMREMLGYCSQHLCWPEGWYCSDYIHVAEELGFTYLYTTERRMNNPVIGSQRIGRINTKERKNVGWLKRRLFYHTTPGFSSLLARHKGARRIAD

SEQ ID NO: 76219 - protein, 505 aa, Salmonella typhi
MSEQNAQGADEVVDLNNEMKARREKLAALREQGIPFPNDFRRDRTSDQLHAEFDAKEAEELEALNIEVSVAGRMMTRRIMGKASFVTLQDVGGRIQLYVARDDLPEGVYNEQFKKWDLGDILGAKGKLFKTKTGELSIHCTELRLLTKALRPLPDKFHGLQDQEARYRQRYLDLISNDESRNTFKTRSKILAGIRQFMVARGFMEVETPMMQVIPGGASARPFITHHNALDLDMYLRIAPELYLKRLVVGGFERVFEINRNFRNEGISVRHNPEFTMMELYMAYADYKDLIELTESLFRTLAQDVLGTTQVPYGDEVFDFGKPFEKLTMHEAIKKYRPETDMADLDNFDSAKAIAESIGIHVEKSWGLGRIVTEIFDEVAEAHLIQPTFITEYPAEVSPLARRNDVNPEITDRFEFFIGGREIGNGFSELNDAEDQAQRFLDQVNAKAAGDDEAMFYDEDYVTALEHGLPPTAGLGIGIDRMVMLFTNSHTIRDVILFPAMRPVK

SEQ ID NO: 76220 - protein, 365 aa, Salmonella typhi
MFEINPVNNRIQDLTERTNVLRGYLDYDAKKERLEEVNAELEQPDVWNEPERAQALGKERSSLEAIVDTLDQMTQGLDDVSGLLELAVEADDEETFNEAVAELNTLEEKLAQLEFRRMFSGEYDSADCYLDIQAGSGGTEAQDWASMLLRMYLRWAEARGFKTEVIEESEGEVAGIKSATIKISGEYAYGWLRTETGVHRLVRKSPFDSGGRRHTSFSSAFVYPEVDDDIDIDINPADLRIDVYRASGAGGQHVNRTESAVRITHIPTGIVTQCQNDRSQHKNKDQAMKQMKAKLYELEMQKKNAEKQAMEDTKSDIGWGSQIRSYVLDDSRIKDLRTGVETRNTQAVLDGSLDQFIEASLKAGL

SEQ ID NO: 76221 - protein, 577 aa, Salmonella typhi
MKQQRQLRRREADETAELPADLPPLLRRLYASRGVRSARELERSVKGMLPWQQLSGIDNAVEILYNAFREGTRIIVVGDFDADGATSTALSVLGMRALGCDNISYLVPNRFEDGYGLSPEVVDQAKARGAQLIVTVDNGISSHAGVAHAKTLRIPVIVTDHHLPGDTLPDAEAIINPNLRDCEFPSKSLAGVGVAFYLMLALRTFLRDKGWFDERGIAPPNLAELLDLVALGTVADVVPLDANNRILTWQGLSRIRAGKCRPGIKALLEISNRDPQQLAASDLGFALGPRLNAAGRLDDMSVGVALLLCDNLGEARVLASELDALNQTRKEIEQGMQAEALILCEKLERSSETLPGGLAMYHPEWHQGVVGILASRIKERFHRPVIAFAPAGDGTLKGSGRSIQGLHMRDALERLDTLYPDLMIKFGGHAMAAGLSLEEHKFEQFQQRFGELVTEWLDPALLQGEVISDGPLSAAEMSMEVAQLLRDAGPWGQMFPEPLFDGRFRLLQQRLVGERHLKVMVEPVGGGPLLDGIAFNIDTTCWPDNGVREVELAYKLDINEFRGNRSLQIIIDDIWPL

SEQ ID NO: 76222 - protein, 237 aa, Salmonella typhi
MKKRFMMFTLLAAAFSGVAHADDAAIRQSLAKLGVQSTEIQASPVAGMKTVLTHSGVLYVTDDGKHIIQGPMYDVSGAHPVNVTNKLLMSQLNALEKEMIVYKAPDEKHVITVFTDITCGYCHKLHEEMKDYNALGITVRYLAFPRQGLESQAEQDMKSIWCAKDKNKAFDDAMAGKGVKPASCDVNIADHYALGVQLGVSGTPAIVLSNGYVVPGYQGPKEMKAFLDEHQKQTSGK

SEQ ID NO: 76223 - protein, 298 aa, Salmonella typhi
MEQDLARIEQFLDALWLERNLAENTLSAYRRDLSMVVAWLHHRGKTLATAQADDLQTLLAERVEGGYKATSSARLLSAMRRFFQHLYREKYREDDPSAQLASPKLPQRLPKDLSEAQVERLLQAPLIDQPLELRDKAMLEVLYATGLRVSELVGLTMSDISLRQGVVRVIGKGNKERLVPLGEEAVYWLETYLEHGRPWLLNGVSIDVLFPSQRAQQMTRQTFWHRIKHYAVLAGIDSEKLSPHVLRHAFATHLLNHGADLRVVQMLLGHSDLSTTQIYTHVATERLRQLHQQHHPRA

SEQ ID NO: 76224 - protein, 115 aa, Salmonella typhi
MLLHGLVAAVILLMPWPLSYTPLWMILLSLVVFDCVRSQRRINTCQGEIKLLMDGRLRWQGQDWTLLRPPWLLKSGMVLRLRAESGRHQHLWLAADSMEEAEWRELRRILLQQPI

SEQ ID NO: 76225 - protein, 88 aa, Salmonella typhi; identical to SEQ ID NO: 73283

SEQ ID NO: 76226 - protein, 326 aa, Salmonella typhi
MAFISFPPRHPSSSARLPLTLIALDDWALSSITGVDSEKYIQGQVTADVSQMTEQQHLLAAHCDAKGKMWSTLRLFRERDGFAWIERRSVREAQLTELKKYAVFSKVVIAPDDERVLLGVAGFQARAALANVFSELPNSENQVVRDGASTLLWFEHPAERFLLVTDVATANMLTEKLHGEAELNNSQQWLALDIEAGIPVIDAANSGQFIPQATNLQALGGISFKKGCYTGQEMVARAKFRGANKRALWLLAGKASRVPEAGEDLELQMGENWRRTGAILAATQLDDGQLLVQAVMNNDLEAESVFRVRDDANTLHIVPLPYSLEE

SEQ ID NO: 76227 - protein, 219 aa, Salmonella typhi
MVQKPLMTQGYSLAEEIANSISHGIGLVFGIVGLVLLLVQAVEANAGMTAIASYSLYGGSMILLFLASTLYHAIPHQRAKIWLKKFDHCAIYLLIAGTYTPFLLVGLDSPLARGLMIVIWSLALFGILFKLTIAHRFKVLSLVTYLAMGWLSLIVVYQLAIKLAIGGVTLLAVGGVVYSLGVIFYVCKRIPYNHAIWHGFVLGGSVCHFLAIYLYVGQA

SEQ ID NO: 76228 - protein, 477 aa, Salmonella typhi
MRKLTLPKDFLWGGAVAAHQVEGGWNKDGKGPSICDVLTSGAHGVPREITQNVVAGKYYPNHEAVDFYGHYKEDIRLFAEMGFKCFRTSIAWTRIFPNGDESQPNEAGLKFYDDMFDELLKYNIEPVITLSHFEMPLHLVQHYGGWTNRKVVDFFVRFAEVVFERYKHKVKYWMTFNEINNQRNWRAPLFGYCCSGVVYTEHENPEETMYQVLHHQFVASTLAVKAARRINPQMKVGCMLAMVALYPFSCKPEDVMFAQESMRERYVFTDVQLRGYYPSYVLNEWERRGFNIKMEDGDLEVLREGTCDYLGFSYYMTNAVKAEGGSGDAISGFEGSVPNPYVKASDWGWQIDPVGLRYSLCELYERYQKPLFIVENGFGAYDKVEEDGSINDDYRIDYLRAHIEEMKKAVTYDGVDLMGYTPWGCIDCVSFTTGQYSKRYGLIYVNKHDDGTGDMSRSRKKSFNWYKEVIASNGEKL

SEQ ID NO: 76229 - protein, 957 aa, Salmonella typhi
MTQTLSQLENRGAFIERHIGPDAAQQQEMLNAVGAESLNALTGQIVPKDIQLATPPQVGEAATEYAALAELKAIAGRNKRFTSYIGMGYTAVQLPPVILRNMLENPGWYTAYTPYQPEVSQGRLEALLNFQQVTLDLTGLDMASASLLDEATAAAEAMAMAKRVSKLKNANRFFVAADVHPQTLDVVRTRAKTFGFDVIVDDADKVLDHQDVFGVLLQQVGTTGEIHDYGTLISELKARKVIVSVAADFMALVLLTAPGKQGADIVFGSAQRFGVPMGYGGPHAAFFAAKDEFKRSMPGRIIGVSKDAAGNTALRMAMQTREQHIRREKANSNICTSQVLLANIASLYAVYHGPVGLKRIANRIHRLTDILAAGLQQKGLKLRHAHYFDTLCVEVADKAAVLARAEAAEINLRSDIHNAVGITLDETTTRENVAQLFNVLLGDSHGLNIETLDKDVALDSRSIQQGMLRDDAILTHPVFNRYHSETEMMRYMHSLERKDLALNQAMIPLGSCTMKLNAAAEMIPITWPEFAELHPFCPPEQAEGYHQMISQLSDWLVKLTGYDAVCMQPNSGAQGEYAGLLAIRHYHGSRNEGHRDICLIPASAHGTNPASAHMAGMQVVVVACDKNGNIDLDDLRAKAEQHAANLSCIMVTYPSTHGVYEETIREVCEVVHQFGGQVYLDGANMNAQVGITSPGFIGADVSHLNLHKTFCIPHGGGGPGMGPIGVKAHLAPFVPGHSVVQIEGMLTRQGAVSAAPFGSASILPISWMYIRMMGAEGLKQASQVAILNANYIASRLKDAYPVLYTGRDGRVAHECILDIRPLKEETGISELDIAKRLIDYGFHAPTMSFPVAGTLMVEPTESEGKAELDRFIDAMLAIRAEIDQVKAGVWPLEDNPLVNAPHIQSELVAEWAHPYSREVAVFPAGVADKYWPTVKRLDDVYGDRNLFCSCVPISDYQ

SEQ ID NO: 76230 - protein, 364 aa, Salmonella typhi
MAQQTPLYEQHTLCGARMVDFHGWMMPLHYGSQLDEHHAVRTDAGMFDVSHMTIVDLHGSRTREFLRYLLANDVAKLTKTGKALYSGMLNASGGVIDDLIVYYFTEDFFRLVVNSATREKDLSWITQHAEPYAIDITVRDDLSLIAVQGPNAQEKAATLFTDQQRHAVEGMKPFFGVQAGDLFIATTGYTGEAGYEIAMPNEKAADFWRALVEAGVKPCGLGARDTLRLEAGMNLYGQEMDEGISPLAANMGWTIAWEPADRDFIGREALEMQREKGHEQLVGLVMTEKGVLRNELPVRFTDAQGNQQEGIITSGTFSPTLGYSIALARVPAGIGETAIVQIRNREMPVKVTKPVFVRNGKAVA

SEQ ID NO: 76231 - protein, 400 aa, Salmonella typhi
MQSVDVAIVGGGMVGLAVACGLQGSGLRVAVLDHVVPQQLANDAPPQLRVSAINAASEKLLTRLGVWSNIVARRASCYHGMEVWDKDSFGRITFDDASMGYSHLGHIVENSVIHYALWQKAQQAADITLMAPAELQQVAWGENDAFLTLKDGAMLTARLVIAADGANSWLRNKADIPLTFWDYRHHALVATIRTEEPHGAVARQVFHGEGILAFLPLSDPHLCSIVWSLSPQDAERMQQSGDEAFNQALTIAFDNRLGLCRLESERQVFPLTGRYARQFAAHRLALVGDAAHTIHPLAGQGVNLGFMDAAELVDDLCRLQRQGKDIGQHLYLRRYERSRKHSAAMMLAGMQGFRDLFAGENPAKKLLRDIGLKLADTLPGVKPQLLRQAMGLNDLPQWLR

SEQ ID NO: 76232 - protein, 182 aa, Salmonella typhi
MIRQRRRALTPEQQRRFGQQAAARMLSFPPVVMAHTVAVFLSFDGELDTQPLIEQLWQAGKRVYLPVLHPFSPGNLLFLHYHPQSALVTNRLNIREPRLDVRDVLPLAKLDVLVTPLVAFDEGGQRLGMGGGFYDRTLQNWQQHKILPVGYAHDCQLVEKLPVEEWDIPLPAVVTPSKIWEW

SEQ ID NO: 76233 - protein, 450 aa, Salmonella typhi
MFIGFDYGTANCSVAIMRDGHPQLLTMENNSALLPSMLCAPTREAVSEWLYRHHDVPATDEETQALLRRAIRYNREEDIEVGAQSVQFGLASLAHYIDDPQEVWFVKSPKSFLGASGLKPQQVALFEDLVCAMMVHILHTAHSQLPEAITQAVIGRPINFQGLGGDDANRQAQGILERAAKRAGFQEVVFQYEPVAAGLDYEATLREEKRVLVVDIGGGTTDCSMLLMGPQWRQRADRENSLLGHSGCRVGGNDLDIALAFKNLMPLLGMGGETEKGIALPVLPWWNAVAINDVPAQSDFYSSANGRLLNDLVRNAREADKVALLLKVWRQRLSYRLVRCAEESKIALSGQADVTARLPFISDDLAVAISQQGLEAALDQPLARILEQVQLALDSAQEKPDVIYLTGGSARSPLIKKALSEQLPGIPVAGGDDFGSVTAGLARWAEVVFR

SEQ ID NO: 76234 - protein, 413 aa, Salmonella typhi
MKGSNTFRWAIAIGVVVAAAAFWFWHSRSESPTAAPGVAAQAQHTAAAGRRGMRDGPLAPVQAATATTQAVPRYLSGLGTVTAANTVTVRSRVDGQLIALHFQEGQQVNAGDLLAQIDPSQFKVALAQAQGQLAKDNATLANARRDLARYQQLAKTNLVSRQELDAQQALVNETQGTIKADEANVASAQLQLDWSRITAPVSGRVGLKQVDVGNQISSSDTAGIVVITQTHPIDLIFTLPESDIATVVQAQKAGKTLVVEAWDRTNSHKLSEGVLLSLDNQIDPTTGTIKIKARFTNQDDTLFPNQFVNARMLVDTEQNAVVVPAAAVQMGNEGHFVWVLNDENNVSKKRVKIGIQDNRNVVISAGLSAGDRVVTDGIDRLTEGAKVEVVEPQTTMADEKSPSRHEGQKGARA

SEQ ID NO: 76235 - protein, 1040 aa, Salmonella typhi
MQVLPPGSTGGPSRLFILRPVATTLLMAAILLAGIIGYRFLPVAALPEVDYPTIQVVTLYPGASPDVMTSSVTAPLERQFGQMSGLKQMSSQSSGGASVVTLQFQLTLPLDVAEQEVQAAINAATNLLPSDLPNPPIYSKVNPADPPIMTLAVTSNAMPMTQVEDMVETRVAQKISQVSGVGLVTLAGGQRPAVRVKLNAQAIAALGLTSETVRTAITGANVNSAKGSLDGPERAVTLSANDQMQSADEYRKLIIAYQNGAPVRLGDVATVEQGAENSWLGAWANQAPAIVMNVQRQPGANIIATADSIRQMLPQLTESLPKSVKVTVLSDRTTNIRASVRDTQFELMLAIALVVMIIYLFLRNIPATIIPGVAVPLSLIGTFAVMVFLDFSINNLTLMALTIATGFVVDDAIVVIENISRYIEKGEKPLAAALKGAGEIGFTIISLTFSLIAVLIPLLFMGDIVGRLFREFAVTLAVAILISAVVSLTLTPMMCARMLSRQSLRKQNRFSRACERMFDRVIASYGRGLAKVLNHPWLTLSVAFATLLLSVMLWITIPKGFFPVQDNGIIQGTLQAPQSSSYASMAQRQRQVAERILQDPAVQSLTTFVGVDGANPTLNSARLQINLKPLDARDDRVQQVISRLQTAVATIPGVALYLQPTQDLTIDTQVSRTQYQFTLQATTLDALSHWVPKLQNALQSLPQLSEVSSDWQDRGLAAWVNVDRDSASRLGISMADVDNALYNAFGQRLISTIYTQANQYRVVLEHNTASTPGLAALETIRLTSRDGGTVPLSAIARIEQRFAPLSINHLDQFPVTTFSFNVPEGYSLGDAVQAILDTEKTLALPADITTQFQGSTLAFQAALGSTVWLIVAAVVAMYIVLGVLYESFIHPITILSTLPTAGVGALLALIIAGSELDIIAIIGIILLIGIVKKNAIMMIDFALAAEREQGMSPRDAIFQACLLRFRPILMTTLAALLGALPLMLSTGVGAELRRPLGIAMVGGLLVSQVLTLFTTPVIYLLFDRLSLYVKSRFPRHKEEA

SEQ ID NO: 76236 - protein, 1026 aa, Salmonella typhi
MRFFALFIYRPVATILIAAAITLCGILGFRLLPVAPLPQVDFPVIMVSASLPGASPETMASSVATPLERSLGRIAGVNEMTSSSSLGSTRIILEFNFDRDINGAARDVQAAINAAQSLLPGGMPSRPTYRKANPSDAPIMILTLTSESWSQGKLYDFASTQLAQTIAQIDGVGDVDVGGSSLPAVRVGLNPQALFNQGVSLDEVREAIDSANVRRPQGAIEDSVHRWQIQTNDELKTAAEYQPLIIHYNNGAAVRLGDVASVTDSVQDVRNAGMTNAKPAILLMIRKLPEANIIQTVDGIRAKLPELRAMIPAAIDLQIAQDRSPTIRASLQEVEETLAISVALVILVVFLFLRSGRATLIPAVAVPVSLIGTFAAMYLCGFSLNNLSLMALTIATGFVVDDAIVVLENIARHLEARMKPLQAALQGTREVGFTVISMSLSLVAVFLPLLLMGGLPGRLLREFAVTLSVAIGISLVVSLTLTPMMCGWMLKSSKPRTQPRKRGVGRLLVALQQGYGTSLKWVLNHTRLVGVVFLGTVALNIWLYIAIPKTFFPEQDTGVLMGGIQADQSISFQAMRGKLQDFMKIIRDDPAVNNVTGFTGGSRVNSGMMFITLKPRGERKETAQQVIDRLRVKLAKEPGAKLFLMAVQDIRVGGRQANASYQYTLLSDSLPALREWEPKIRKALSALPQLADVNSDQQDNGAEMNLIYDRDTMSRLGIDVQAANSLLNNAFGQRQISTIYQPMNQYKVVMEVDPRYSQDISALEKMFVINRDGKAIPLSYFAQWRPANAPLSVNHQGLSAASTIAFNLPTGTSLSQATEAIDRTMTQLGVPSTVRGSFSGTAQVFQQTMNSQLILIVAAIATVYIVLGILYESYVHPLTILSTLPSAGVGALLALELFNAPFSLIALIGIMLLIGIVKKNAIMMVDFALEAQRSGGLTPEQAIFQACLLRFRPIMMTTLAALFGALPLVLSGGDGSELRQPLGITIVGGLVMSQLLTLYTTPVVYLFFDRLRLRFSRKNSKPVVEI

SEQ ID NO: 76237 - protein, 467 aa, Salmonella typhi
MKVWRPGITGKLFLAIFATCIVLLISMHWAVRVSFERGFIDYIKHGNEQRLQMLGDALGDQYQQHGNWRFLRNNDRFVFQILRSFEHDNDRDKPGPGMPPHGWRTQFWVVDQNGRVLVGPRGPVPHDGTRRPILVNGVEVGAIIASPVERLTRNTDINFDMQQRRASWMIVALSTLLAALATFLLARGLLAPVKRLVEGTHRLAAGDFTTRVTPTSADELGKLAQDFNQLASTLEKNQQMRRDFMADISHELRTPLAVLRGELEAIQDGVRQFTPESVTSLQAEVGTLTKLVDDLHQLSLSDEGALAYQKTTVDLVPQLEVAGGAFRERFTSRGLTLHYALPDSMTVFGDPDRLMQLFNNLLENSLRYTDSGGGLHISAEQRDKSLFLTFADSAPGVSDEQLQKLFDRFYRTEVSRNRASGGSGLGLAICVNIVHAHNGHLHAAHSPFGGVSITVELPLDRDLQREV

SEQ ID NO: 76238 - protein, 453 aa, Salmonella typhi; identical to SEQ ID NO: 75319

SEQ ID NO: 76239 - protein, 350 aa, Salmonella typhi
MTDIAQLLGKDADSLLQHRCMTIPSDQLYLPGKDYVDRVMIDNNRPPAVLRNMQTLYNTGRLAGTGYLSILPVDQGVEHSAGASFAANPRYFDPKNIVELAIEAGCNCVASTYGVLASVSRRYAHRIPFLVKLNHNETLSYPTEYDQTLYASVEQAFNMGAVAVGATIYFGSEQSRRQIEEISAAFERAHELGMVTVLWAYLRNSSFKKDGVDYHVSADLTGQANHLAATIGADIVKQKMAENNGGYKAVNFGYTDDRVYSKLTSDNPIDLVRYQLANCYMGRAGLINSGGADGGDTDLGDAVRTAVINKRAGGMGLILGRKAFKKSMADGVKLINAVQDVYLDSKVTIA

SEQ ID NO: 76240 - protein, 423 aa, Salmonella typhi; identical to SEQ ID NO: 75321

SEQ ID NO: 76241 - protein, 248 aa, Salmonella typhi; identical to SEQ ID NO: 72878

SEQ ID NO: 76242 - protein, 265 aa, Salmonella typhi
MQPDLHCRTLAAHTLKHFRALSPLTHCMTNDVVQTFTANTLLALGASPAMVIDPVEARPFAAIANALLINVGTLTASRADAMRAAVESAYDAKTPWTLDPVAVGALEFRRRFCLDLLSLRPAAIRGNASEILALSGMALGGRGVDTTEAALAALPAAQALARQIDCIVVVTGEIDYVTNGQRTLSIPGGDPLMTRIVGTGCALSAVVAASCALPGAALDNVASACCWMKLAGQVAAERSEGPGSFIPAFLDALYHLDMEAANATN

SEQ ID NO: 76243 - protein, 104 aa, Salmonella typhi; identical to SEQ ID NO: 43727

SEQ ID NO: 76244 - protein, 677 aa, Salmonella typhi
MTQVAKKILVTCALPYANGSIHLGHMLEHIQADVWVRYQRMRGHEVNFICADDAHGTPIMLKAQQLGITPEQMIGEMSQEHQTDFAGFNISYDNYHSTHSDENRELSELIYTRLKENGFIKNRTISQLYDPEKGMFLPDRFVKGTCPKCKSADQYGDNCEVCGATYSPTELIEPKSVVSGATPVMRDSEHFFFDLPSFSEMLQAWTRSGALQEQVANKMQEWFESGLQQWDISRDAPYFGFEIPNAPGKYFYVWLDAPIGYMGSFKNLCDKRGDTTSFDEYWKKDSDAELYHFIGKDIVYFHSLFWPAMLEGSHFRKPTNLFVHGYVTVNGAKMSKSRGTFIKASTWLKHFDADSLRYYYTAKLSSRIDDIDLNLEDFVQRVNADIVNKVVNLASRNAGFINKRFDGVLAAELADPQLYKTFTDAAAVIGEAWESREFGKAIREIMALADVANRYVDEQAPWVVAKQEGRDADLQAICSMGINLFRVLMTYLKPVLPTLSERVEAFLNSELNWDAIEQPLLSHKVNTFKALYNRIDMKQVEALVEASKEEVKAAAAPVTGPLADFPIQETITFDDFAKIDLRVALIENAEFVDGSDKLLRLTLDLGGEKRNVFSGIRSAYPDPQALIGRQTVMVANLAPRKMRFGVSEGMVMAAGPGGKDIFLLSPDDGAKPGQQVK

SEQ ID NO: 76245 - protein, 336 aa, Salmonella typhi; identical to SEQ ID NO: 74880

SEQ ID NO: 76246 - protein, 71 aa, Salmonella typhi; identical to SEQ ID NO: 72703

SEQ ID NO: 76247 - protein, 239 aa, Salmonella typhi
MIKVLIVDDEPLARENLRILLQGQDDIEIVGECANAVEAIGAVHKLRPDVLFLDIQMPRISGLEIVGMLDPEHRPYIVFLTAFDEYAIKAFEEHAFDYLLKPIEEKRLEKTLHRLRQERSKQDVSLLPENQQALKFIPCTGHSRIYLLQMDDVAFVSSRMSGVYVTSSEGKEGFTELTLRTLESRTPLLRCHRQFLVNMAHLQEIRLEDNGQAELILRNGLTVPVSRRYLKSLKEAIGL

SEQ ID NO: 76248 - protein, 561 aa, Salmonella typhi
MYEFNLVLLLLQQMCVFLVIAWLMSKTRLFIPLMQVTVRLPHKLLCYVMFSIFCIMGTYFGLHIEDSIANTRAIGAVMGGLLGGPVVGGLVGLTGGLHRYSMGGMTALSCMISTIVEGLLGGLVHSVLIRRGRPDKVFSPLTAGAITCVAELVQMLIILLIARPFDDALHLVSNIAAPMMMTNTVGAALFMRILLDKRAMFEKYTSAFSVTALKVAASTEGILRQGFNEVNSMKVAQVLYQELDIGAVAITDREKLLAFTGIGDDHHLPGKPISSGYTLKAIETGEVVYADGNEVPYRCSLHPQCKLGSTLVIPLRGENQRVMGTIKLYEAKNRLFSSINRTLGEGIAQLLSAQILAGQYERQKALLTQSEIKLLHAQVNPHFLFNALNTIKAVIRRDSEQASQLVQYLSTFFRKNLKRPSEIVTLADEIEHVNAYLQIEKARFQSRLQVQLDVPSTLSRQKLPAFTLQPIVENAIKHGTSQLLDTGNVAIRARREGQHLMLDIEDNAGLYQPSAGSSGLGMSLVDKRLREHFGDDYGISVACEPDCFTRITLRLPLEEDA

SEQ ID NO: 76249 - protein, 243 aa, Salmonella typhi
MKRLCDPLLWLIVLFLLLLFGLPYSQPFFAALFPDLPRPVYQQESFAALALAHFWLVGISSLFAVVVGVGAGIAVTRESGKEFRPLVETIAAVGQTFPPVAVLAIAVPVMGFGQQPAIIALILYGVLPILQATLAGLGAVPASVMSVASGMGMSRRQQLYQVELPLAAPVILAGIRTSVIINIGTATIASTVGASTLGTPIIIGLSGFNTAYVIQGALLVALAAIIIDRLFERLTRALTRHAK

SEQ ID NO: 76250 - protein, 765 aa, Salmonella typhi
MKWLCSVGVAVSLAMQPALAENLFGNHPLTPEARDAFVTDLLKKMTVDEKIGQLRLISVGPDNPKEAIREMIKDGQVGAIFNTVTRQDIRQMQDQVMALSRLKIPLFFAYDVVHGQRTVFPISLGLASSFNLDAVRTVGRVSAYEAADDGLNMTWAPMVDVSRDPRWGRASEGFGEDTYLTSIMGETMVKAMQGKSPADRYSVMTSVKHFAAYGAVEGGKEYNTVDMSSQRLFNDYMPPYKAGLDAGSGAVMVALNSLNGTPATSDSWLLKDVLRDEWGFKGITVSDHGAIKELIKHGTAADPEDAVRVALKAGVDMSMADEYYSKYLPGLIKSGKVTMAELDDATRHVLNVKYDMGLFNDPYSHLGPKESDPVDTNAESRLHRKEAREVARESVVLLKNRLETLPLKKSGTIAVVGPLADSQRDVMGSWSAAGVANQSVTVLAGIQNAVGDGAKILYAKGANITNDKDIVDFLNLYEEAVKIDPRSPQAMIDEAVQAAKQADVVVAVVGESQGMAHEASSRTNITIPQSQRDLITALKATGKPLVLVLMNGRPLALVKEDQQADAILETWFAGTEGGNAIADVLFGDYNPSGKLPISFPRSVGQIPVYYSHLNTGRPYNPEKPNKYTSRYFDEANGPLYPFGYGLSYTTFTVSDVTLSSPTMQRDGKVTASVEVTNTGKREGETVIQMYLQDVTASMSRPVKQLKGFEKITLKPGERKTVSFPIDIEALKFWNQQMKYDAEPGKFNVFIGVDSARVKQGSFELL

SEQ ID NO: 76251 - protein, 253 aa, Salmonella typhi
MTKVAIVTASDSGIGKACALLLAQNGFDIGITWHSDERGAQETAKKAAQFGVRAETIHLDLSQLPEGAQAIEHLIQRLGRVDVLVNNAGAMTKSAFIDMPFTQWRQIFTVDVDGAFLCAQIAARHMIKQGEGGRIINITSVHEHTPLPQASAYTAAKHALGGLTKSMALELIEHHILVNAVAPGAIATPMNDMDDSDIKPGSEPSIPIARPGSTHEIASLVAWLCSEGASYTTGQSLIVDGGFMLVNPQFNAK

SEQ ID NO: 76252 - protein, 312 aa, Salmonella typhi
MRVLLAPMEGVLDALVRELLTEVNDYDLCITEFVRVVDQLLPVKVFHRICPELLHASRTPSGTPVRIQLLGQHPQWLAENAARATALGSYGVDLNCGCPSKVVNGSGGGATLLTDPELIYQGAKAMRAAVPSHLPVTVKVRLGWDSGDRKFEIADAVQQAGASELVVHGRTKAQGYRAEHIDWQAIGEIRQRLTIPVIANGEIWDWQSAQACMATSGCDAVMIGRGALNIPNLSRVVKYNEPRMPWPEVVTLLQKYTRLEKQGDTGLYHVARIKQWLGYLRKEYIEATELFQSIRALNRSSEIARVIQAIKI

SEQ ID NO: 76253 - protein, 345 aa, Salmonella typhi
MSEINQNVKDSRQQYYQHISGQNLTPLWESLHHLVPQTPNANCAPAYWNYQEIRPLLMESGNVIGAKEAIRRVLVLENPALRGQSSITATLYAGLQLILPGEVAPSHRHNQSALRFIVEGKGAFTAVDGERTPMHTGDFILTPQWRWHDHGNPGSEPVVWLDGLDLPLVNLLGCGFAEDYPEDQQPVTRKEGDYLPRYAANMLPLRHQRGNSSPIFNYRYDRSREALHDLTRMGDPDEWEGYKLRYVNPVTGGYPMPSMGAFLQLLPKGFASRVARSTDSTIYHVVEGAGQVTIGNETFHFSAKDIFVAPTWHEVSFRSSEDTVLFSFSDKPVQEALGPFREARY

SEQ ID NO: 76254 - protein, 363 aa, Salmonella typhi
MMKKSKAMLFIAPALFSYAMAAQACTTLAIQDKQGDIFHGRTLEYMQDLPSWLTYYPAGTQFDKKTPDGSQGISYQAKYPILAITSTITDGDSRDILEGMNSAGLSFSENMIMNAQLPPLPASEYKQAIPVTSLGEWALARFATVGEVKQAIKEGKFWSPELHRFGDLKSPFHYAFYDKKGGSIVVEVENGKFHVYDNPTRVMTNGPAFPWHLTNLNNYTQLTNVDRSSGTLGGIKVMQPDSGIAIADLPSSDTSVSRFIRGVYYTTYAPQATSAHDAMNTLAHIMSRFDRPKNITVDYMGSEGEGNATRKPVSEYTVWTTLSDLTHGEMMVRGYNDINYKTWSLSQFKNATAPVFEKINVKG

SEQ ID NO: 76255 - protein, 302 aa, Salmonella typhi
MANWAQKLKLHHLQTLVALGEQGNLTHVARMMNISQPALSKWLSQLEDEIGITLFERHSKGLRPSEGGKLLLQHAQRLINDLERSQYEIARFKQGGLVGSLKIGCSPVATDCVSQAILSLLNEMPTLHLNIEEKVMTPLLHDLLAGQVDVVVGRVGGRALQLPLNYQVLYTEPVCFVARPHHPLAARAQIAWSDLAHWRWIVWPTGTPIRISIDNALVDNGVMLPENTIESASMNVSTNLLQSSDMISILSLRLAQRYASQGQLAILNLPKIEQKGSVGMFWRKNETPSLALSRFLYFLAQV

SEQ ID NO: 76256 - protein, 81 aa, Salmonella typhi; identical to SEQ ID NO: 75324

SEQ ID NO: 76257 - protein, 315 aa, Salmonella typhi
MTVLFHLLKIIMIVRPQQHWIRLIFVWHGSVLSKIFSRLLLNFLLSIAVIIMLPWYTMLGIKFTLAPFSILGVAIAIFLGFRNNACYARYVEARHLWGQLMIASRSILREVKTTLPDERGIEDFVRLQIAFAHCLRMTLRRQPQTQVLGNYLDQEALQKVVASHSPANRILLLMGEWLAIRRRSGKLSDILFHSLNNRLNDMSSVLAGCERIANTPVPFAYTLILHRTVYLFCIMLPFALVVDLHYMTPFISVLISYTFIALDALAEELEDPFGTENNDLPLDAICNAIEIDLLQMNDERDIPAKRIPDKRYQLT

SEQ ID NO: 76258 - protein, 290 aa, Salmonella typhi
MDLTQLEMFNAVALTGSITQAAAKVHRVPSNLTTRIRQLEADLGVSLFIRENQRLRLSPAGHNFLRYSQQILALVDEARMVVAGEEPQGLFSLGALESTAAVRIPALLAGYNQRYPKIQFALTTGPSGAMLDGVLEGKLNAAFIDGPLMHPGLEGIPAYQEEMMIVAPHGHSVVSRASEVNGYNIYAFRANCSYRRHFESWFHADGATPGTIHEMESYHGMLACVIAGAGIALMPASMLNSMPGHHQVEAWPLAEKWRWLSTWLMWRRGAMTRQLEAFIELLNAQLASAD

SEQ ID NO: 76259 - protein, 396 aa, Salmonella typhi
MTINPVSRKVAWLRVVTLAIAAFIFNTTEFVPVGLLSDIAESFHMQTAQVGIMLTIYAWVVAVMSLPFMLLTSQMERRKLLICLFVLFIASHVLSFLAWNFTVLVISRIGIAFAHAIFWSITASLAIRLAPAGKRAQALSLIATGTALAMVLGLPIGRVVGQYFGWRTTFFAIGMGALITLLCLIKLLPKLPSEHSGSLKSLPLLFRRPALMSLYVLTVVVVTAHYTAYSYIEPFVQNVAGLSANFATVLLLILGGAGIIGSLVFGKLGNRHASSLVSIAIALLVVCLLLLLPAADSEAHLAILSIFWGIAIMVIGLGMQVKVLALAPDATDVAMALFSGIFNIGIGAGALVGNQVSLHWSMSAIGYIGAIPACAALVWAVLIFRKWPVTLEEQPH

SEQ ID NO: 76260 - protein, 221 aa, Salmonella typhi; identical to SEQ ID NO: 74872

SEQ ID NO: 76261 - protein, 285 aa, Salmonella typhi
MEMLEEHRCFGGWQQRWRHHAATLNCAMTFSIFLPPTQDNEPPPVLYWLSGLTCNDENFTTKAGAQRIAAELGIVLVMPDTSPRGEQVADDSGYDLGHGAGFYLNATQPPWASHYRMYDYLRDELPALIQTQFNVSDRCAISGHSMGGHGALIMALKNPGKYTSISAFAPIVNPSRVPWGIKALTAYLGEDESAWTEWDSCELMLASQPQDAIPVLIDQGDSDQFLADQLQPAVLAEAARQTAWPMTLRIQPGYDHSYYFIASFIEDHLRFHARYLRDEHETSPT

SEQ ID NO: 76262 - protein, 395 aa, Salmonella typhi
MNPGLRRSTLALLASSLLLTIGRGATLPFMTIYLNRQYGLGVDLIGYALTSALTIGVIFSLGFGILADKFDKKRYMLLAIIAFACGFIAIPMVHNVVLVVLLFALINCAYSVFSTVLKAWFADNLTATTKTRIFSLNYTVLNIGWTVGPPLGTLLVMQSINLPFWLAAICSAFPLVFIQVWVTRSVAASEGKNAAIWSPSVLLRDKALLWFTLSAFLASFVGVAFASCISQYVMVVADSGFAEKVVAVVLPVNAVIVVSLQYAVGRRLTAVNIRPMMTTGTVFFIAGLIGFIFSGDNLFFWGLSAAVFTIGEIIYAPGEYMLIDNIAPAGMKASYFSAQSLGWLGAAVNPLASGVILTTLPAWSLFVVLIIAIVFAWALMLKGMRITPTQQAITC

SEQ ID NO: 76263 - protein, 285 aa, Salmonella typhi
MKYIGAHVSAAGGLANAPARAAEIGATAFALFTKNQRQWRAAPLTPQVIDDFKIACEKYHFSAAQILPHDSYLINLGHPVSEALEKSRDAFLDEMQRCEQLGLTLLNFHPGSHLMQIAQEDCLARIAESINIALAQTEGVTAVIENTAGQGSNLGFEFEQLAAIIDGVEDKSRVGVCIDTCHAFAAGYDLRTPEACEKTFAEFGKIVGFQYLRGMHLNDAKSAFGSRVDRHHSLGEGNIGHDAFRWIMQDARFDGIPLILETINPDIWAEEIAWLKAQQIAEAMA

SEQ ID NO: 76264 - protein, 228 aa, Salmonella typhi
MTVETQLNPTQPVNQQIYRILRRDIVHCLIPPGTPLSEKEVSTRFNVSRQPVREAFIKLAENGLIQIRPQRGSYVNKISLSQVQNGCFVRQAIECAVVRRAAAMITDNQCYQLAQNLHLQHIAIERKQIDDFFQLDDDFHQKLAQIADCQLAWDTIENIKATIDRVRYMSLDHVSPPEMLLRQHHDIFSALENRDGNAVESAMTQHLQEISESVQLIRQENSGWFSEE

SEQ ID NO: 76265 - protein, 488 aa, Salmonella typhi
MQNRLLSAKATLPDYDRAALAARMVHLGFGAFHRAHQGVYTDILAAEQHSDWGYYEVNLIGGEQQIADLKQQDNLYTVAEMSADAWTARVVGVVKAALHVQVDGLERVLAAMCEPQIAIVSLTITEKGYCHSPATGQLLLEHPMIAADLQNPHQPLTAPGIIVEALARRKAAGLPAFTVMSCDNMPENGHVTRQVVTAYAREVDAELAIWIEQNVTFPSTMVDRIVPAVTPETLDKIEQLTGVRDPAGVACEPFRQWVIEDTFVAGRPQWENAGATLVADVVPFEEMKLRMLNGSHSFLAYLGYLAGYQHINDCMDDDNYRLTAQALMLREQAPTLKVQGVDLQRYADQLIARYRNPALRHHTWQIAMDGSQKLPQRMLDSVRWHLANHSDFDLLALGVAGWMRYVGGVDEQGKAIDVSDPLLPVIQRAVANSEEGASRVKALLGMAEIFGNDLPQAARFTQKVQEAYDSLLTYGAKASVAKYAERLK

SEQ ID NO: 76266 - protein, 393 aa, Salmonella typhi
MHNSPAAAAPKSFDLTSTAFLIVAFLTGIAGALQTPTLSIFLTDEVHARPGMVGFFFTGSAVIGIIVSQFLAGRSDKKGDRKKLIVFCCVLGMLACVLFAWNRNYFILLFIGVFLSSFGSTANPQMFALAREHADRTGREAVMFSSILRAQVSLAWVIGPPLAYALAMGFSFTVMYLSAAVAFIVCGVMVWFFLPSMRKDAPLATGTLEAPRRNRRDTLLLFVICTLMWGTNSLYIINMPLFIINELHLPEKLAGVMMGTAAGLEIPTMLIAGYFAKRLGKRLLMCIAVVAGLCFYAGMLLAHAPATLLGLQLLNAIYIGILGGIGMLYFQDLMPGQAGSATTLYTNTIRVGWIIAGSLAGIAAEIWNYHAVFWFALVMIVATMFCLARIKDV

SEQ ID NO: 76267 - protein, 601 aa, Salmonella typhi
MIARVMLLLVALVSAGAQAQEIKESYAFAVLGEPKYAFNFDHFDYVNPAAPKGGQMTLSAIGTFDNFNRYSLRGNPGVRTEALYDTLFTTSDDEPGSYYPLIADHARYAADYSWVEISINPRARFHDGTPITARDVAFTFHKFMTEGVPQFRLVYKGTTVKAIAPLTVRIELAKPGKEDMLSLFSLPIMPEKFWKNHKLSDPLSTPPLASGPYRITQWKMGQYIVYSRVKNYWAANLPVNRGRFNLDTVRYDYYLDDNVAFEAFKAGAFDLRLENDAKNWATRYIGKNFDNHYIIKEEQKNESAQDTRWLAFNIQRPVFKDRRVREAVTLAFDFEWMNKALFYNAWSRTNSYFQNTEYAARNYPDADELVLLAPMKKDLPPEVFTQIYQPPVSNGDGYDRENLLKADALLTQAGWVINGQQRVNSVTGKPLTFELLLPASSNSQWVLPFQHNLQRLGITMTIRQVDNSQLTNRMRSRDYDMMPRLWRAMPWPSSDLQISWASEYIDSSYNAPGVQSPVVDKLIAQIIAAQGDKAKLVPLGRALDRVLTWNYYMLPMWYMAQDRLAWWDKFSHPAIRPVYTIGLDTWWYDVNKAAKLPAARR

SEQ ID NO: 76268 - protein, 396 aa, Salmonella typhi
MTTRQHSSFAIVFILGLLAMLMPLSIDMYLPALPVISAQFGVPAGSAQMTLSTYILGFALGQLIYGPMADSLGRKPVILGGTLVFAAAAVACALAQTIDQLIVMRFFHGLVAAAASVVINALMRDIYPKEEFSRMMSFVMLVTTIAPLMAPIVGGWVLVWLSWHYIFWILAIAAILASVMIFALIKETLPVERRQPFHIRTTIGNFAALFRHKRVLSYMLASGFSFAGMFSFLSAGPFVYIEINHVPPQDFGYYFALNIVFLFVMTIINSRFVRRVGALNMFRAGLWIQFAMAVWMVFSALMGIGFWALVVGVAAFVGCVSMVSSNAMAVILDEFPHMAGTASSLAGTFRFGIGAIVGALLSLATFNSAWPMIWSIALCAACSILFYLYASRPKKR

SEQ ID NO: 76269 - protein, 231 aa, Salmonella typhi
MRLDKFIAQQLGVSRAIAGREIRGNRVTVDGDIIKNAAFKLLPEHAVAYDGNPLAQQHGPRYFMLNKPQGYVCSTDDPDHPTVLYFLDEPVAYKLHAAGRLDIDTTGLVLMTDDGQWSHRITSPRHHCEKTYLVTLESPVADDTAAQFAKGVQLHNEKDLTKPATLEVITPVQVRLTISEGRYHQVKRMFAAVGNRVVELHRERIGAITLDENLAPGEYRPLTEEEIASVG

SEQ ID NO: 76270 - protein, 586 aa, Salmonella typhi; identical to SEQ ID NO: 74860

SEQ ID NO: 76271 - protein, 94 aa, Salmonella typhi; identical to SEQ ID NO: 74861

SEQ ID NO: 76272 - protein, 382 aa, Salmonella typhi
MIKLENLTKQFVQKKGQPLKAVDNVNLNVPEGEMCVLLGPSGCGKTTTLKMINRLIAPSSGNILINGENTNDMDTVTLRRNIGYVIQQIGLFPNMTIEENITVVPRMLGWDKARCKQRAEELMDMVALDARKFLHRYPKEMSGGQQQRIGVIRALAADPPVLLMDEPFGAVDPINREVIQNQFLDMQRKLKKTVMLVSHDIDEALKLGDRIAVFRQGRIVQCASPDELLAKPANEFVGSFVGQDRTLKRLLLVSAGDVTDQQPTITARPSMPLSEAFGIMDDHDIRAITVIDNDGKPLGFVKRREARNASGICADITHPFRITGKAEDNLRIVLSRLYESNTSWMPIVDEDGRYNGEISQDYIADYLSSGRTRRALNIHESS

SEQ ID NO: 76273 - protein, 358 aa, Salmonella typhi
MIEVGRIIAERYKILSYVGKGGMQDVYKVLDLKLDLDLALKTPLPGLESKRFLKSAKIAAKINHHNIAKTFDYVEDNGNIFLAEEFVEGENLEEKLRHFDFLDPHYGACILHNLAKGIMASHKADVIHRDLKPSNVMVSGGVQISNLKITDFGIATLTQELFDEAAASGDLTRSTSGTIKGALPFMSPELMFGKKGKPIEASTDIWPLGAMMFKLLTGDYPFGVYLDAAVNVKTKNRMEWPTFMTANPQYQSLSQDLQKIVDKCLSYDSDKRPTAETLVKACETLCYLSEERHVGRVNNLIQGGISGFIDGTPSNSFFSMESVYGSRYPNTSTRNTVCYSTFDGHPWPRAHPVILWKD

SEQ ID NO: 76274 - protein, 357 aa, Salmonella typhi
MRKTKMKINHVLPERYSLKSTELGGGMGDILICKDNHLDRDVIVKLLKDGEEERRLLDEQKALLKLRSKHVVQLYDLIDITVSEKTKKGLVLEYINGVDLNYNPSESHPEKLKKLWQIACGLSDIHSAKVIHRDIKPNNIRVDENKIVKILDFGLARTSGTEAFTHSVIGTLGYMAPELWKRKNISFDQKIDVYAYGVLVLDLFGIEKPDELYEHPPAAITNIPELGKILPKDLARTFISCLSHDKYARPAMSSVRDQIAKYLLKDRHRALFVLNGKKYEINAKNKSVTITWGTSGSMEIVYDGFDFKVGNFSGSATINNQQVITNKVFPSCSVITLINEKSRSFVTFDISRPEVIS

SEQ ID NO: 76275 - protein, 417 aa, Salmonella typhi
MSRTTILDDATASDIDEQRHSQPVQFIKRGTAPFMRVTLALFSAGLATFALLYCVQPILPVLSQEFGVSPASSSVSLSISTAMLAIGLLFTGPLSDAIGRKPVMVTALLLASCCTLLSTMMTSWHGILIMRALIGLSLSGVAAVGMTYLSEEIHPSFVAFSMGLYISGNSIGGMSGRLLSGVMTDFFNWRIALAAIGCFALASALMFWKILPASQHFRPTSLRPKTLFINFRLHWRDRGLPLLFAEGFLLMGAFVTLFNYIGYRLMLSPWELSQAVVGLLSVAYLTGTWSSPKAGAMTSRYGRGPVMLFSTAVMLGGLLLTLFTSLWLIFAGMLLFSAGFFAAHSVASSWIGPRARRAKGQASSLYLFSYYLGSSIAGTLGGVFWHSYGWNGVGGFIALMLVLAILVGTRLHHRLHA

SEQ ID NO: 76276 - protein, 273 aa, Salmonella typhi
MHKTIAVLLGIVCFLPVMAKAGGAETDATDASDVKTLFFNHDDRVPVADPTQSPWDAIGQLETASGNLCTATLISPHIALTAGHCLLTPPKGKPDKAVALRFVARKGVWRYEIHGIEGRVEPSLGRRLKADGDGWIVPPAAASWDFGLVILRYPPSGITPVPLFTGDKAALTAALKAADRKVTQSGYPEDHLNALYSHQDCVVTGWAQNAVLSHQCDTLPGDSGSPLLLHTDSGWQLIGVQSSAPAAKDRWRADNRAISVTGFRDKLKALAQD

SEQ ID NO: 76277 - protein, 509 aa, Salmonella typhi
MRIGIPKERLPNETRVAATPKTVEQLLKLGFSVAIESGAGQLASFDDKAFAQAGADIVDGNAIWQSEIILKVNAPEEEEIALLNPGTTLVSFIWPAQNPGLMEKLAERKVTVMAMDSVPRISRAQSLDALSSMANIAGYRAIVEAAHEFGRFFTGQITAAGKVPPAKVMVIGAGVAGLAAIGAANSLGAIVRAFDTRPEVKEQVQSMGAEFLELDFKEEAGSGDGYAKVMSEAFIKAEMALFAAQAKEVDIIVTTALIPGKPAPKLITRDMVDSMKAGSVIVDLAAQNGGNCEYTVANQVVTTDNGVKVIGYTDLPGRLPTQSSQLYGTNLVNLLKLLCKEKDGNIDVDFDDVVIRGVTVIRDGDITWPAPPIQVSAQPQAAPKAAPAPKEPEKPASPWRKYALMALAIILFGWLADVAPKEFLGHFTVFALACVVGYYVVWNVSHALHTPLMSVTNAISGIIVVGALLQIGQGGWVSFLSFIAVLIASINIFGGFTVTQRMLKMFRKN

SEQ ID NO: 76278 - protein, 281 aa, Salmonella typhi
MFRYLCNQKAALLTAILLMAAGVLTLCFPESWYPQETEWQLTAEKEITGIHGGLSGLTWNPDSRTLFAVTDHPSSVVELDTEGNVLRVIPSDGDHDFEAIEYLGGNRYALSRERERTLTTHCIDSSTTVLPPATYSLTLDVNRHSDNAGFEGLAWGRGEHALMVAQEKKPLRLYVTDRSPDALSVSDSLTHRASLPWFLKDISGLHYDRNNGLLYVLSHESAVVVVSDLDGGRKVMSLRRGHCGLRRDIPQAEGIASDDRDTLWIVSEPNLFYRFTRTASS

SEQ ID NO: 76279 - protein, 1249 aa, Salmonella typhi
MTLDFYVRESNYIQLDDDLRNWIGSRFSSKFVRNPDSKEPDDNQVKRWPQIRHGNVTQRLVKLLILGAKFNTVNTVTIDIVNAWLKEAWLQLTGSLAVLKPDGNRFYLPKEHLTFSLVQKARICPVTNKLLATTFKGLTPYLPMHIQFERLTSAQYDAFLAQEVTLPAIWEHDRSQDDYVDGLTKVRDWVSQDPQVLPLRSQNLWTDINDRVVEGGFYYRTAEHSAQQSSERLQSYERMFKNGQLNVLNCSTTMEMGVDIGGISAVVMNNVPPHPANYLQRAGRAGRSKESRAISYTLCKGNPHDQQVFANPLWPFETVIPAPMVAMNSERLVQRHVNSLLLSEYLCHVVGETEKERTSLNSQWFFGEELDQSVCNRFKAWLERPTLSIDNALERLVKGTALHGVTAEKLRDKTQEAIAVLQTRWLGIFRDLVKQESESQPNTPYRRRLELEKKRHCGEYLLRDLAARTFLPGYGFPTDVVTFDNFTMEDYIREKTHKSRDKNDREDNVSRYKGLPSRNLSVAIREYAPGAEIILDGRVFRSAGVSLHWHNLNADTNEAQRLDSAWRCHKCGTLGYEEGIGGSGDLFCTNSACGERITLDNRRQVLQPAGFVTDAHTPVTNNIETMKFIPVVPAWVFVKAERVPLPNPLMGFMASGADGHVFQQSMGEGGHGYALCLSCGRAESMLNATDTPKSMEAHYPPRPGKSDRDSQNQRIICPGSTALNKNVTLGALARTDVFELILRRPQNGEYIPDNSDEGRIVAMTLAVALRRALASVLGVSATELGYAVRPVRLDNEQSVLAVQLYDIISGGAGFASSAPLHIEAVLKGMVKQLGCRHCDTACSECLLDSQTRHDHDQLDRKAAQAWLGEDFSHYIGLPEAEKFSLADAQYCPGSIEDAIRRAINDGARKLTLWMNGPLNEWDLYARQFRTAIQNYRLKDEVEVTLVVPGHIEDPELLQEIAQFAAIGMQLCQSELNTDTPVVAQVAFNDRLMMLISRSPEATIPGPNWHLNSQMVIRSHAFEPITLSKAELLSDAAGSRGLVNDIEIHKQLNGPVSQFGQRFWGVLTGAQEDIQTLLKENQVTRIHYSDRYLQNPVALALLGGLLKPLKSILAQDAQVTIDTLFKSKERPGNKPFHDWMSEADFQDFADQWFAASMGRAVVVNTVGSPRDIPHHRKLMVTFSNGQALKIRFDQGMGYWRIVFARAYRDFDFNDDVAFQLGNMAKACVEGQVVNSEESWATDVLVQVIVP

SEQ ID NO: 76280 - protein, 241 aa, Salmonella typhi
MFPVGRKWANIVAKKTAKDGATSKVYAKFGVEIYAAAKQGEPDPESNSALKFVIERAKQAQVPKHVIDKAIDKAKGGGDETFVQGRYEGFGPNGSMVIAETLTSNVNRTIANIRTIFNKKGGNIGAAGAVSYMFDNTGVIVFKGTDPDHIFEILLDAEVDVRDVTEEEGNIVIYTEATDLHKGIAALKAAGITEFSTTELEMIAQSDVELSPEDLEIFEGLVDALEDDDDVQKVYHNVANL

SEQ ID NO: 76281 - protein, 460 aa, Salmonella typhi
MRYRFPDNFWWGSACSALQTEGDSLNGGKSQTTWDVWFERQPDRFHQGIGPAETSTFYRHWKQDIALLKQLKHNSFRTSLSWARLIPDGVGEVNPQAVSFYNHVIDELLAQGITPFITLFHFDMPMVMQEKGGWENRDVVEAFGRYAQTCFTLFGDRVKHWFTFNEPIVPVEGGYLYDFHYPNVVDFKRAATVAYHTVLAHSTAVRAWRAGRYDGEIGVVLNLTPSYPRSQHPADVQAAHHADLLFNRSFLDPVLKGEYPAELVALLKTYDQLPACQPGDRQLIADGKIDLLGINYYQPRRVKCRDTAVNPQAPFMPEWLFDYYDMPGRKMNPYRGWEIYAPGIYDIITNLRDNYGNPRCFISENGMGVENEQRFVQAGQIHDDYRIDFISEHLKWLHKGISEGCHCLGYHMWTFIDNWSWLNGYKNRYGFVQLDLATQTRTVKKSGEWFAATAEHNGFD

SEQ ID NO: 76282 - protein, 257 aa, Salmonella typhi
MKSNTSQQRPYQEVGAMIRDLIVQTPYRPGERLPPEREIAERLNVTRTVVREALIMLEIKGLVEVRRGAGIYVLDSADNNEMEGADVNHCNDAGPFELLQARQLLESNIAEFAALQATREDIIKMRQALQLEERELASSAPGGSESGDMQFHLAIAEATHNSMLVELFRQSWQWRENNPMWLQLHSHLGDTLYRKEWLGDHKQILAALIKKDARAAKLAMWQHLENVKQRLLEFSNVDDIYFDGYLFESWPLDNVDA

SEQ ID NO: 76283 - protein, 153 aa, Salmonella typhi
MTTQVRKNVMDMFIDGARRGFTIATTNLLPNVVMAFVIIQALKITGLLDWVGHICQPVMALWGLPGEAATVLLASLMSMGGAVGVAASLATAGALSGHDVTVLLPAIYLMGNPVQNVGRCLGTAEVNAKYYPHIIAVCAINALLSIWVMQLIV

SEQ ID NO: 76284 - protein, 300 aa, Salmonella typhi
MGSTRKGMLNVLIAAVLWGSSGVCAQYIMEQSRMSSQFLTMIRLLFAGLILVTFSFMHGDKIFSILKNRKDALSLLIFSVVGALTVQLTFLLTIEKSNAATATVLQFLSPTIIVAWFALARRTRPGILVLTAILTSLIGTFLLVTHGNPTSLSISSGALFWGIASAFAAAFYTTWPSRLIAQYGTLPVVGWSMSFGGLILLPFYAKEGTHFAVSGSLILAFFYLVVIGTSLTFSLYLKGAQLIGGPKASILSCAEPLSSALLSLLLLGISFTLPDWLGTLLILSSVILISLDSRRRARAA

SEQ ID NO: 76285 - protein, 416 aa, Salmonella typhi
MLEQMGIAAKAASYKLALLSSCEKNRVLEKIADELEAQMESILSANVQDVEQARANGLSEAMLDRLALTPARLKAIADDVRQVCNLADPAGQVIDGGLLDSGLRLERRRVPLGVVGVIYEARPNVTVDVASLCLKTGNAVILRGGKETHRTNAATVLVIQKALKACDLPEAAVQAIDNPDRSLVSEMLRMDKYIDMLIPRGGAGLHKLCREQSTIPVITGGIGVCHIFVDSSADIAPALKIIVNAKTQRPSTCNTVETLLVHQDIAERFLPALSKQMAESGVTLHGDETVMQALHGPAKLVALKPEELDNEFLSLDLNVVVVENMDGAIAHIREHGTQHSDAILTCDMHNAARFVNEVDSAAVYVNASTRFTDGGQFGLGAEVAVSTQKLHARGPMGLEALTTYKWIGFGDGTIRA

SEQ ID NO: 76286 - protein, 462 aa, Salmonella typhi
MSGGKLPEGWVTTHLSEICSKPQYGYTTKSSSMGDVKFLRTTDITKGAVDWSSVPYCMDAPEDVSKYQLQDRDIVISRAGSVGFSFLVQNPPSQVVFASYLIRFKPVNYFSEYYLKRFLESSDYWNQLSLMSAGNAVQNVNAQKLSTLTVPIPPIAEQKIIAEKLDTLLAQVDSTKARLEQIPQILKRFRQAVLAAAVSGLLIGSNKRNHHPLCSEWQWPDLPSTWSVHKYSELVDSRLGKMLDKAKNFGSATKYLGNINVRWFSFDLENLQDILISDIERRELSLKLGDVLICEGGEPGRCAIWSEPQDIPVIFQKALHRARVKDKIIPEWLVYNLKNDSNNISLSQLFTGTTIKHLTGKALANYPIRVPPLEEQHEIVRRVEQLFAWADTIEKQVNNALNRVNSLTQSILAKAFRGELTAQWRAENPSLISGENSAAALLEKIKAERAASGGKKTSRKKA

SEQ ID NO: 76287 - protein, 205 aa, Salmonella typhi
MMRKPSQIVHCISCDLSCQLFPDSAVRVQYCHNAAFSIWPDGNAFLKKGFIEKLLLDRHNHLSSGFIFVDFSFPNLRRFTDLQWADSLANSGMHIVLISDRSLTPLANYWILKSNKIQGIIYSDDDDIVQQQKMHRLFTGRLANSKRGRTLNYTEFILLKHFVSGISIQQIVNIDNIDIKKLYVHKLRLENKLGHSIHKIISNIL

SEQ ID NO: 76288 - protein, 1169 aa, Salmonella typhi
MNKSNFDFLKGVNDFIYAIACAAENNYPDDPNTTLIKMRMFGEATAKHLGQLLDIPVCENQHDLLRELGKIAFIDDSILSVFHKLRRIGNLAVHEFHNDLDDAQMCLRLGFRLSVWYYRLVTKDYDFPVPMFVLPEHGENLYHQEVLTLKQQLERQAQEKVQSQAELEAQQQRLVALNGYIAILEGKQQETEAQTKARLAALEAQLAAKDAELAKQTEQERKAYHKEITDQAIKRTLNLSEEESRFLIDAQLRKAGWQADSKTLRFAKGARPEPGVNKAIAEWPTGTDETGKTGFADYVLFVGLKPIAVVEAKRKNTDVFSKLNESYRYSKYFDNGFLRDTLLEHYAPDEVHDAVPEYEISWQDTSGKQRFKIPFCYSTNGREYRAAMKTKSGIWYRDVRHTTNMSKALPEWHRPEELLDMLGSDPQKQNQWFAENPGMSELGLRYYQEDAVRAVEKAIVNGQQEILLAMATGTGKTRTAIALMFRLIQSQRFKRVLFLVDRRSLGEQALGSFEDTRINGDTFNSIFDIKGLTDKFPEDSTKIHVATVQSLVKRTLQSDEPMPVGRYDCIVVDEAHRGYILDKEQTEGELQFRSQLDYVSAYRRILDHFDAVKIALTATPALHTVEIFGEPVYRYTYRTAVIDGYLIDQDPPIQIVTRNAQDGVYLSEGEQVERLNPQGELINDTLADDQDFEVADFNRGLVIPAFNRAVCGELTKYLDPIGQQKTLVFCVTNAHADMVVDELRTAFKKKYPQLEHDAIIKITGDADKDAKKVQSMIVRFNKERLPNIVVTVDLLTTGVDIPSICNIVFLRKVKSRILYEQMKGRATRLCPSVGKTSFKIYDCVDIYSSLESVDTMRPVVVRPQVELQTLVNEITDSETYKTIEADGRSFAEHSHEQLVAKLQRIIGLATYNRDHSETVDKQVRRLDELCLDAAGVNFGGLASRLREKGPHWSAEIFNKLPGFIARLERLKTDINALRDAPIFLDIDDEVVSVKSLYGDYDTPQDFLEAFDALVQHAPNAQPALQAVINRPRDLTRKGLVELQEWFDRQHFEESSLRSAWKETRNEDIAARLIGHIRRAAVGDALKPFDERVDHALARIKGENDWSPEQLSWLDRLAQALKEKVVLDDDVFKTGNFHRRGGKSMLQRTFDDNLDSVLDKFSDYIWDELA

SEQ ID NO: 76289 - protein, 318 aa, Salmonella typhi
MTPIAVTLLTGFLGAGKTTLLRHILNEQHGFKIAVIENEFGEVSVDDQLIGDRATQIKTLTNGCICCTRSNELEDALLDLLDSRDRGDIAFDRLVIECTGMADPGPIIQTFFYHDVLCERYLLDGVIALVDAVHANEQMNQFTIAQSQIGYADRILLTKTDVAGDSEKLRERLARINARAPVYTVVHGDIDLSQLFNTSGFMLEENVLASQPRFHFIADKQNDVSSIVVELDYPVDISEVSRVMENLLLESADKLLRYKGMLWIDGEPNRLLFQGVQRLYSADWDRPWGDETPHSTLVFIGIQLPEDEIRAAFAGLRK

SEQ ID NO: 76290 - protein, 67 aa, Salmonella typhi
MFDTLGQAKKYLGQAAKMLIGIPDYDNYVEHMKTNHPDKPYMTYEEFFRERQQARYGGDGKGGMRCC

SEQ ID NO: 76291 - protein, 178 aa, Salmonella typhi; identical to SEQ ID NO: 73188

SEQ ID NO: 76292 - protein, 297 aa, Salmonella typhi
MKRPDYRTLQALDAVIRERGFERAAQKLCITQSAVSQRIKQLENMFGQPLLVRTVPPRPTEQGQKLLALLRQVELLEEEWLGDEQTGSTPLLLSLAVNADSLATWLLPALAPVLADSPIRLNLQVEDETRTQERLRRGEVVGAVSIQHQALPSCLVDKLGALDYLFVASKPFAERYFPNGVTRSSLLKAPAVAFDHLDDMHQAFLQQNFDLPPGSVPCHIVNSSEAFVQLARQGTACCMIPHLQIEKELESGELINLTPGLLQRRMLYWHRFAPESRMMRKVTDALLEYGHKVLRQD

SEQ ID NO: 76293 - protein, 248 aa, Salmonella typhi
MKFKVMALAALVGLSAMSAQASELPEGPHIVTSGTASVDAVPDIATLAIEVNVAAKDAATAKKQADERVAQYLSFLEQNQIAKKDISAANLRTQPDYDYQNGKSILKGYRAVRTVEVTLRQLDKLNSLLDGALKAGLNEIRSVSLGVAQPDAYKDKARKAAIDDAIHQAQALAAGFNSKLGPVYSVRYHVSNYQPSPVVRMMKAADAAPVSAQETYEQPTIQFDDQVDVVFQLEPGTGQTSTTAASTQ

SEQ ID NO: 76294 - protein, 716 aa, Salmonella typhi
MDTKKIFKHIPWVILGIIGAFCLSVVALRRGEHVSALWIVVASVSVYLVAYRYYSLYIAQKVMKLDPTRATPAVINNDGLNYVPTNRYVLFGHHFAAIAGAGPLVGPVLAAQMGYLPGTLWLLAGVVLAGAVQDFMVLFISSRRNGASLGEMIKEEMGTVPGTIALFGCFLIMIIILAVLALIVVKALAESPWGVFTVCSTVPIALFMGIYMRFLRPGRVGEVSVIGIVLLVASIYFGGVIAHDPYWGPALTFKDTTITFALIGYAFVSALLPVWLILAPRDYLATFLKIGVIVGLALGIVILNPELKMPALTQYVDGTGPLWKGALFPFLFITIACGAVSGFHALISSGTTPKLLACETDARFIGYGAMLMESFVAVMALVAASIIEPGLYFAMNTPPAGLGITMPNLHEMGGENAPLIMAQLKDVTAHAAATVSSWGFVISPEQILQTAKDIGEPSVLNRAGGAPTLAVGIAHVFHKVLPMADMGFWYHFGILFEALFILTALDAGTRSGRFMLQDLLGNFVPFLKKTDSLVAGIIGTAGCVGLWGYLLYQGVVDPLGGVKSLWPLFGISNQMLAAVALVLSTVVLIKMQRTKYIWVTVIPAVWLLICTTWALGLKLFSANPQMEGFFYMANLYKEKIANGTNLTAQQIANMNHIVVNNYTNAGLSILFLVVVYSIIFYGFTTWMKVRNSDKRTDKETPYVPVPEGGVKISSHH

SEQ ID NO: 76295 - protein, 763 aa, Salmonella typhi
MSELLSVALFLASVLIYAWKAGRNTWWFAATLTVLGLFVILNITLYASDYFTGDGINDAVLYTLTNSLTGAGVGKYILPGIGIALALVAVFGALGWVLRRRRHHPHHVGYSLLALLLALGSVDASPAFRQITELVKSQMRDGDPDFAVYYKEPAKTIPHPKLNLVYIYGESLERTYFDNDAFPNLTPELGALKNEGLDFSHTMQLPGTDYTIAGMVASQCGIPLFAPFEGNASASVSSFFPQNICLGDILKNSGYQNYFVQGANLRFAGKDVFLKSHGFDHLYGAEELKTVVADPSYRNDWGFYDDTVLDEAWKKFEALSRSGQRFSLFTLTVDTHHPDGFISRTCNRKRYDYDGKPNQSFSTVSCSQENIAEFINKIKASPWFKDTVIVVSSDHLAMNNTAWKYLNKQDRNNLFFILRGDKPQQETLAVKRNTMDNGATVLDILGGDNFIGLGRSSLSGQSLSEVFLNVKEKVLAMKPDIIRLWNFPKEIKDFTVDRDKNMIAFSGSHFRLPLLLRVSDKRVEPLPESEYSAPLRFQLADFAPRDNFVWIDRCYKMAQLWAPALALSTDWCVSQGQLGGQQTVQHVDKAQWQGKTAFKDTMIDMERYKGNVDTLKIVDNDIRYKADSFIFNVAGAPEEVKQFSGISRPESWGRWSNAQLGDEVKIEYKAPLPKKFDLVITAKAFGDNANRPIPVRVGNEEQTLVLGHDVSTITLHFNNPTDANTLVIAPPAPVSTNEGNILGHSPRKLGIGMVEIKVVNVES

SEQ ID NO: 76296 - protein, 387 aa, Salmonella typhi
MSVIKMTDLDLAGKRVFIRADLNVPVKEGKVTSDARIRASLPTIELALKQGAKVMVTSHLGRPTEGEYNEEFSLLPVVNYLKDKLSNPVRLVKDYLDGVDVAEGELVVLENVRFNKGEKKDDEALSKKYAALCDVFVMDAFGTAHRAQASTHGIGKFADVACAGPLLAAELDALGKALKEPARPMVAIVGGSKVSTKLTVLDSLSKIADQLIVGGGIANTFVAAQGHSVGKSLYEADLVDEAKRLLTTCDIPVPTDVRVATEFSETAPATLKSVNDVKEDEQILDIGDASAQQLAEILKNAKTILWNGPVGVFEFPNFRKGTEIVANAIADSEAFSIAGGGDTLAAIDLFGIADKISYISTGGGAFLEFVEGKVLPAVAMLEERAKK

SEQ ID NO: 76297 - protein, 703 aa, Salmonella typhi
MYLFESLNQLIQTYLPEDQIKRLRQAYLVARDAHEGQTRSSGEPYITHPVAVACILAEMKLDYETLMAALLHDVIEDTPATYQDMEQLFGKSVAELVEGVSKLDKLKFRDKKEAQAENFRKMIMAMVQDIRVILIKLADRTHNMRTLGSLRPDKRRRIARETLEIYSPLAHRLGIHHIKTELEELGFEALYPNRYRVIKEVVRAARGNRKEMIQKILSEIEGRLQEAGIPCRVSGREKHLYSIYCKMVLKEQRFHSIMDIYAFRVIVHDSDTCYRVLGQMHSLYKPRPGRVKDYIAIPKANGYQSLHTSMIGPHGVPVEVQIRTEDMDQMAEMGVAAHWAYKEHGETSTTAQIRAQRWMQSLLELQQSAGSSFEFIESVKSDLFPDEIYVFTPEGRIVELPAGATPVDFAYAVHTDIGHACVGARVDRQPYPLSQPLSSGQTVEIITAPGARPNAAWLNFVVSSKARAKIRQLLKNLKRDDSVSLGRRLLNHALGGSRKLAEIPQENIQRELDRMKLATLDDLLAEIGLGNAMSVVVAKNLQQGEAVVPTVAQSNHGHLPIKGADGVLITFAKCCRPIPGDPIIAHVSPGKGLVIHHESCRNIRGYQKEPEKFMAVEWDKETEQEFITEIKVEMFNHQGALANLTAAINTTTSNIQSLNTEEKDGRVYSTFIRLTARDRVHLANIMRKIRVMPDVIKVTRNRN

SEQ ID NO: 76298 - protein, 224 aa, Salmonella typhi
MAACTTLLLPAQTVFPVYSAAAFLCLLALKSTRRRAKYVAWLMLSLGFGLWLVHGGWLTEWISGQPRDPQRWVYAVTLWLRLLAIVSTSQLWMQYVPVQRFIRALFASRLPPGIAYLFAGPLLVVEQLKRQLTIVHEAQRARGVPLDEGWYQRLRAMPALIVPLTQNALNDLTIRGAALDMRGFRLHRARTTLWAPKDSMLQRVARYGMVLLILAEAGVWIWLR

SEQ ID NO: 76299 - protein, 663 aa, Salmonella typhi
MSSRKELANAIRALSMDAVQKAKSGHPGAPMGMADIAEVLWRDFLNHNPTNPSWADRDRFVLSNGHGSMLIYSLLHLTGYDLPMSELQNFRQLHSKTPGHPEVGYTAGVETTTGPLGQGIANAVGMAIAEKTLAAQFNRPGHDIVDHFTYVFMGDGCMMEGISHEVCSLAGTLKLGKLIAFYDDNGISIDGHVEGWFTDDTAKRFEAYGWHVIRGIDGHDADAIKRATEEARAVTDKPSLLMCKTIIGFGSPNKQGTHDSHGAPLGDAEIALTREQLGWKYAPFEIPSEIYAQWDAKEAGQAKESAWNEKFAAYEKAFPQEAAEFTRRMKGDMPADFNAKANEFIAKLQANPSKIASRKASQNAIEAFGPLLPEFLGGSADLAPSNLTLWSGSKAINEDAAGNYIHYGVREFGMTAIANGIALHGGFLPYTSTFLMFVEYARNAVRMAALMKQRQVMVYTHDSIGLGEDGPTHQPVEQVASLRVTPNMSTWRPCDQVESAVAWKYGVERQDGPTALILSRQNLAQQERTEEQLANIARGGYVLKDCAGQPQIIFIATGSEVELAVAAYEKLTAEGVKARVVSMPSTDAFDKQDAAYRESVLPKAVSARVAIEAGIADYWFKYVGLNGAIVGMTTFGESAPAELLFEEFGFTVDNVIAKAKALL

SEQ ID NO: 76300 - protein, 354 aa, Salmonella typhi
MTTPSWRSLRIKKYQFSLRLFLFLSAVSALFTLVFPLYQINVFCTPMIGIVGLSVLLLIWHGKYGQKRINLPFISLLFGGIWAARIALKYPALGHYDFSFLLISLLSVLFIGSIAFAANIVAFTLYSLPPVAVCLWLNGNEQGLRILYLLALPMVGIAIQHVIQKRYDNFAQQLMFKLLAERETLNGLSMLDPLTGLYNRRGLQNRLDTLQAPGSHEHYVLLLDIDHFKAYNDHYGHMMGDQALIRVSAAIRDAVRSRDVVCRFGGEEFLVLLTTAEPQQARATAERIRQEVYDLKIPHMFNESVATNVTVSIGIAPLTDRNIGDAIEKADKALYEAKHLGRNHILVSDDMRAL

SEQ ID NO: 76301 - protein, 287 aa, Salmonella typhi; identical to SEQ ID NO: 73182

SEQ ID NO: 76302 - protein, 306 aa, Salmonella typhi
MSTLGHQYDNSLVSNAFGFLRLPMNFQPYDSDADWVITGVPFDMATSGRAGGRHGPAAIRQVSTNLAWEHHRFPWNFDMRERLNVVDCGDLVYAFGDAREMSEKLQAHAEKLLSAGKRMLSFGGDHFVTLPLLRAHAKHFGKMALVHFDAHTDTYANGCEFDHGTMFYTAPKEGLIDPHHSVQIGIRTEFDKDNGFTVLDACQVNDRGVDDILAQVKQIVGDMPVYLTFDIDCLDPAFAPGTGTPVIGGLTSDRAIKLVRGLKDLNIVGMDVVEVAPAYDQSEITALAAATLALEMLYIQAAKKGE

SEQ ID NO: 76303 - protein, 342 aa, Salmonella typhi
MSAFTPASEVLLRHSDDFEQSRILFAGDLQDDLPARFECAASRAYTQQFHHWQALSRQMGDNVRFSLVAQASDVADCDTLIYYWPKNKPEAQFQLMNILSLMPVGSDVFVVGENRSGVRSAEPMLADYAPLNKVDSARRCGLYHGRLEKQPQFSLESWWAEYNIDGLTIKTLPGVFSRDGLDVGSQLLLSTLTPHTKGKVLDVGCGAGVLSAALASHSPKVRLTLCDVSAPAVEASRATLAANGLEGEVFASNVFSEVKGRFDMIISNPPFHDGMQTSLDAAQTLIRGAVRHLNSGGELRIVANAFLPYPKILDETFGFHEVIAQTGRFKVYRIVMTRQAKK

SEQ ID NO: 76304 - protein, 213 aa, Salmonella typhi
MKPYQRQFIEFALNKQVLKFGEFTLKSGRKSPYFFNAGLFNTGRDLALLGRFYAEALVDSGIEFDLLFGPAYKGIPIATTTAVALAEHHDKDLPYCFNRKEAKDHGEGGSLVGSALQGRVMLVDDVITAGTAIRESMEIIQAHRATLAGVLISLDRQERGRGEISAIQEVERDYGCKVISIITLKDLIAYLEEKPDMAEHLAAVRAYREEFGV

SEQ ID NO: 76305 - protein, 384 aa, Salmonella typhi; identical to SEQ ID NO: 74915

SEQ ID NO: 76306 - protein, 696 aa, Salmonella typhi
MFATTRMALLIGGAIGGATFPLFAQETTKNDTVIVTSPVQSGATRLATPDIETPQSVSIITRQQFEEQGATSVRQAVSYTPGVYSNQIGASNRFDYIVLRGFSDGSLDNVYLDGLKMMGDTNSHSSLVVDPWFLEDIEVVRGPASVLYGRSSPGGIVSLTSRKPAFDAGGEVKLFAGNNNQRGAAFDVTGPLDDNERVAARLSGMTRYADSQFTPLKEERYALMPSLTWRITDRTRLDLMAYLHRDPQGGSHSGLPYQGTVVPYNGGKISNTFFEGEDDYDKYDRRENMVGYNIEHLFDNGWSVRQKLRYLHTKVTLNQVYAAGWLNETALNRGYSGSGEKMSAIALDNQLDGSVDTGAINHRLLVGIDYQDRSNHTTGYYGAFPPIDAFNPVYGAQPDYITLYSREKHKLRQTGYYLQDQMSWDRWRFTLGGRYDRVSVSNIDKLHDSRSDLDKNNVSTRAALLYLFDNGVAPYLSYSTAFTSTSFADENGNVLEPMKGKQWEAGVKYEPLGGNSQFSAAVYRINQTNIATKEEPTDPYRSIGEIESKGVELEAISHLSDSVRLQAAYTYTDIRYKKSSPQEQGKRAVYAPRNQASAWLSYDVKSGLLEWLTLGSGIRYVNGVTSDRLNTHTLPSYTLVDMVVGYDLSSIGLNGLSAQLNVNNLTDKRYVAACNSLSYCYFGAERSIVGSVSWAF

SEQ ID NO: 76307 - protein, 389 aa, Salmonella typhi
MTDTTILQNNTHVIKPKKSVALSGVPAGNTALCTVGKSGNDLHYRGYDILDLAEHCEFEEVAHLLIHGKLPTRDELNAYKSKLKALRGLPANVRTVLEALPAASHPMDVMRTGVSALGCTLPEKEGHTVSGARDIADKLLASLSSILLYWYHYSHNGERIQPETDDDSIGGHFLHLLHGEKPTQSWEKAMHISLVLYAEHEFNASTFTSRVIAGTGSDVYSAIIGAIGALRGPKHGGANEVSLEIQQRYETPDEAEADIRKRVENKEVVIGFGHPVYTIADPRHQVIKRVAKQLSEEGGSLKMYHIADRLETVMWETKKMFPNLDWFSAVSYNMMGVPTEMFTPLFVIARVTGWAAHIIEQRQDNKIIRPSANYTGPEDRVFVPIEKRC

SEQ ID NO: 76308 - protein, 464 aa, Salmonella typhi; identical to SEQ ID NO: 74916

SEQ ID NO: 76309 - protein, 529 aa, Salmonella typhi
MTLSPYLQEVAKRRTFAIISHPDAGKTTITEKVLLFGQAIQTAGTVKGRGSSQHAKSDWMEMEKQRGISITTSVMQFPYHDCLVNLLDTPGHEDFSEDTYRTLTAVDCCLMVIDAAKGVEDRTRKLMEVTRLRDTPILTFMNKLDRDIRDPMELLDEVENELKIGCAPITWPIGCGKLFKGVYHLYKDETYLYQTGKGHTIQEVRIVKGLNNPDLDAAVGEDLAQQLRDELELVQGASNEFDEELFLAGEITPVFFGTALGNFGVDHMLDGLVAWAPAPMPRQTDTRTVEASEERFTGFVFKIQANMDPKHRDRVAFMRVVSGKYEKGMKLRQVRTGKDVVISDALTFMAGDRSHVEEAYPGDILGLHNHGTIQIGDTFTQGEMMKFTGIPNFAPELFRRIRLKDPLKQKQLLKGLVQLSEEGAVQVFRPISNNDLIVGAVGVLQFDVVVARLKSEYNVEAIYESVNVATARWVESADAKKFEEFKRKNETQLALDGGDNLTYIAPTMVNLNLTQERYPDVQFRKTREH

SEQ ID NO: 76310 - protein, 235 aa, Salmonella typhi
MYRNFSFAAALLAAAFSGQALADGINNFSQAKAASVKVNADAPGSFYCGCQIRWQGKKGVVDLESCGYKVRKNENRARRIEWEHVVPAWQFGHQRQCWQDGGRKNCAKDPVYCKMESDMHNLQPAIGEVNGDRGNFMYSQWNGGEGQYGQCAMKVDFKAKLAEPPARARGAIARTYFYMRDQYQLKLSRQQTQLFNVWDKQYPVTAWECERDARIAKVQGNHNPYVQRACQARKS

SEQ ID NO: 76311 - protein, 221 aa, Salmonella typhi
MDTLDELLPREKMLRSGIASLSDVELLALFLRTGTPGKDVMTLAKEILQHFGSLYGLLSADFAQFRGVNGIGLAKFAQLKGIAELARRYYSVRMNEESALLSPEMTREFLQSQLTGEEREIFLVIFLDAQHRVLQHSRLFSGTLNHVEVHPREIVREAIKLNASAVILAHNHPSGCAEPSKADKLITERVIKCCQFMDIRVLDHLIIGRGEYVSFAERGWI

SEQ ID NO: 76312 - protein, 243 aa, Salmonella typhi
MRIPRIYHPELLTSGTQISLCEDAANHIGRVLRMGAGQALQLFDGSNQVFDAEIISASKKSVEVQVMKGEIDDRESPLHIHLGQVMSRGEKMEFTIQKSIELGVSLITPLFSERCGVKLDNERLNKKRQQWQKIAIAACEQCGRNRVPEIRPPMALEAWCAEQDSGLRLNLHPRAHASINTLPLPVERVRLLIGPEGGLSADEIAMTARYQFTDILLGPRVLRTETTALTAITALQVRFGDLG

SEQ ID NO: 76313 - protein, 78 aa, Salmonella typhi; identical to SEQ ID NO: 72791

SEQ ID NO: 76314 - protein, 55 aa, Salmonella typhi [sequence omitted]

SEQ ID NO: 76315 - protein, 269 aa, Salmonella typhi
MPELPEVETSRRGIEPHLVGATILHAHIRNGRLRWPVSDEIYRLSDTPVLSVQRRAKYLLLELPDGWIIIHLGMSGSLRILSEALPAEKHDHVDLVMSNGKILRYTDPRRFGAWLWTKELEGHNVLAHLGPEPLSDEFNGEYLQQKCAKKKTAIKPWLMDNKLVVGVGNIYASESLFAAGIHPDRLASSLSTEECDLLARVIKAVLLRSIEQGGTTLKDFLQSDGKPGYFAQELQVYGRKGEPCRVCGTPIVATKHAQRATFYCRHCQK

SEQ ID NO: 76316 - protein, 138 aa, Salmonella typhi; identical to SEQ ID NO: 73178

SEQ ID NO: 76317 - protein, 516 aa, Salmonella typhi
MPASCETALQQRCQQIVTSPVLTPEQKRHFLALEAENALPYPTLPEDARQALDEGVICDMFEGHAPFKPRYVLPDYARFLANGSQWLELEGAKDLDDALSLLTILYHHVPSVTSMPVYLGQLDALLQPYVRILTQDAIDIRIKRFWRYLDRTLPDAFMHANIGPADTPVTRAILRADAELKQVAPNLTFIYDAEITPDDLLLEVAKNICECSKPHISNGPVNDKIFTKGHYGIVSCYNSLPLAGGGSTLVRLNLKAVAERSTSVDDFFSRTLPHYCRQQIAIINSRCEFLYEKSHFFENSFLVQEGLIDPERFAPMFGMYGLAEAVNLLCENAGLTARYGKNETANELGYRISAQLADFVENTPVKYGRKQRALLHAQSGISSDIGTTPGARLPYGDEPDPITHLQTVAPHHAFYHAGISDILTLDETIKRNPQALVQLCLGAFKAGMREFTANVSGNDLVRVTGYMVRLSDLAKFRAEGSRTNTTWLGEEAARNTRILERQPRVVSHEQQMRFSQ

SEQ ID NO: 76318 - protein, 326 aa, Salmonella typhi
MNMEEIVTLSVKHNVSDLHLCNAWPARWRKQGRMETAPFTAPDVDRLLLDWLNDAQQYQWRTHGQLDFAVSLSGTRRLRASAFTHQQGTSLAIRLLPERCPDLAEIQTPPIVPALLASENGLILVTGATGCGKSTTLAAMVGHLNQHADKHILTLEDPIEYRYTSKRCLIQQREIGQHCATFAAGLRAALREDPDVILLGELRDSETIRLALTAAETGHLVLATLHTRGAAQAVERLVDSFPAQEKEPVRSQLAGSLRAVLSQKLEVDRQDGRVALFELLINTPATGNLIREGKLHQLAHVIQTGQQQGMMTFAQSAQWRQAQGRL

SEQ ID NO: 76319 - protein, 234 aa, Salmonella typhi
MNDIAHNLAHIRDKISAAATRCGRSSEEVTLLAVSKTKPASDIAEAIAAGQRAFGENYVQEGVEKIRHFQEAKVEGLHWHFIGPLQSNKSRLVAEHFDWCHTIDRLRIASRLSEQRPDNLPALNVLIQINISDENSKSGIPLAELDELAAAVATLPRLRLRGLMAIPAPESDYVRQFEVARQMAVAFAGLKARYPDVDTLSLGMSDDMEAAIAAGSTMVRIGTAIFGARDYTKN

SEQ ID NO: 76320 - protein, 265 aa, Salmonella typhi
MPLENVMTDLKASSLRALKLMDLTTLNDDDTNEKVIALCHQAKTPVGNTAAICIYPRFIPIARKTLKEQGTPDIRIATVTNFPHGNDDIDIALAETRAAIAYGADEVDVVFPYRALIAGNEQVGFDLVKACKDACAAANVLLKVIIETGELKEEALIRKASEISIKAGADFIKTSTGKVPVNATPESARIMMEVIRDMGVSKTVGFKPAGGVRTAEDAQKFLAIADELFGANWADSRHYRFGASSLLASLLKALGHGDGKSASSY

SEQ ID NO: 76321 - protein, 324 aa, Salmonella typhi
MTDLIHRPRRLRKSAALRAMFEETTLSLNDLVLPIFVEEELDDYKAIDAMPGVMRIPEKQLAREIERIANAGIRSVMTFGISHHTDDTGSDTWKEDGLVARMSRICKQTVPEMIVMSDTCFCEYTSHGHCGVLCEHGVDNDATLANLGKQAVIAAAAGADFIAPSAAMDGQVQAIRQALDAAGFTDTAIMSYSTKFASSFYGPFREAAGTALKGDRKTYQMNPMNRREAIRESLLDEAQGADCLMVKPAGAYLDVLREIRERTELPLGAYQVSGEYAMIKFAAMAGAIDEEKVVLESLGSIKRAGADLIFSYFALDLAEKNILR

SEQ ID NO: 76322 - protein, 961 aa, Salmonella typhi
MHSWKKKLVVSQLALACTLAITSQANATTYDTFGYHDDAATVFGWDDTNDHDYLTYGGYVYNTPASDSGYFDTKFTGDTVNGVISTYYLNHDYANDTANTLDVTNSTIHGMITSYQMGYGQYVWTNGSDYTTHDWVDDDTFNLNISNSTIDDDFEAFYFTDTYLDSDGKTVKTDYDKLVTAGLGTAITLDVESNINITNNSHVAGIALYQNDLGNSTYTTEAHQWDNTINVANSTVTSGSWSEDEEQGHFGNSSEPSDYNGNGWNKDDVALAFVDDPYSNYRMVNNVTFTDSQLLGDVVLESSWNYNFYSNGRLVDDSTTVYTNGGWADDDQNVDHLTLTLNNTKWVGAAVNDSQSMDPVQFYDVDANSLDPDSTNYDAWGRVNSAASFQSGIFDVSLNNGSEWDTTKTSVIDTLAVNSGSQVDVANGSNLTADTITLNGGSAMNIGEGGYVDTDHLTVDTFSTVTLADDVSSAWSDDALYANTITVTHGGMLDIQTNNTNADSVIDTDTLELTSSNVADNNGNVYAGVFNIHSNDYTLNADLVNDRTWDTTQANYGYGVVAMNSDGHLTINGNGDINNGDEADASSTTDNVVAATGNYKVRIDNATGAGSVADYKGNELIYVNDINTDATFSAANKADLGAYTYQAKQEGNTVVLEQMELTDYANMALSIPSANTNIWNLEQDTVGTRLTNARHGLADNGGAWVSYFGGNFNGDNGTINYDQDVNGIMVGVDTKVDGNNAKWIVGAAAGFAKGDLSDRTGQVDQDSQSAYIYSSARFANNIFVDGNLSYSHFNNDLSANMSDGTYVDGNTSSDAWGFGLKLGYDLKLGDAGYVTPYGSVSGLFQSGDDYQLSNDMKVDGQSYDSMRYELGVDAGYTFTYSEDQALTPYFKLAYVYDDSNNDADVNGDSIDNGVEGFAVRVGLGTQFSFTKNFSAYTDANYLGGGDVDQDWSANVGVKYTW

SEQ ID NO: 76323 - protein, 207 aa, Salmonella typhi
MLSLNKPLQEFNRLDKCLSKHGTRFEFVNDKEIICSPDESNTHTFVILEGVVSLVRGDKVLIGIVQAPFIFGLADGVAKKEAQYKLIAESGCIGYRLSSSQTLAIIEQNQLWREAFCWIVWKSQVLELRDKQLIGNNSYDQIRATLMTMIEWDEELRSRIGVMNYIHQRTRVSRSVVAEVLAALRKGNYIEMNKGKLISINRLPSEY

SEQ ID NO: 76324 - protein, 364 aa, Salmonella typhi
MAKLRVGIVFGGKSAEHEVSLQSAKNIVDAIDKTRFDVVLLGIDKAGQWHVNDAENYLQNADDPAHIALRPSAISLAQVPGKHQHQLINAQNGQPLPTVDVIFPIVHGTLGEDGSLQGMLRVANLPFVGSDVLSSAACMDKDVAKRLLRDAGLNIAPFITLTRTNRHAFSFAEVESRLGLPLFVKPANQGSSVGVSKVANEAQYQQAVALAFEFDHKVVVEQGIKGREIECAVLGNDNPQASTCGEIVLNSEFYAYDTKYIDDNGAQVVVPAQIPSEVNDKIRAIAIQAYQTLGCAGMARVDVFLTADNEVVINEINTLPGFTNISMYPKLWQASGLGYTDLISRLIELALERHTANNALKTTM

SEQ ID NO: 76325 - protein, 197 aa, Salmonella typhi
MQKVVLATGNAGKVRELASLLSDFGLDVVAQTKLGVDSAEETGLTFIENAILKARHAAKMTGLPAIADDSGLAVDVLGGAPGIYSARYSGENATDQQNLEKLLHTLRDVPDDKRQARFHCVLVYLRHAEDPTPIVCHGSWPGVITRQAAGNGGFGYDPIFFVPSEGKTAAELTREEKSAISHRGQALKLLLDALRNG

SEQ ID NO: 76326 - protein, 460 aa, Salmonella typhi
MAKAPKRAFVCNECGADYPRWQGQCSACQAWNTITEVRLAASPTVARNERLSGYAGSAGVSKVQKLSDISLEELPRFSTGFKEFDRVLGGGVVPGSAILIGGNPGAGKSTLLLQTLCKLAEQMKTLYVTGEESLQQVAMRAHRLGLPTANLNMLSETSIEQICLIAEEEQPKLMVIDSIQVMHMADIQSSPGSVAQVRETAAYLTRFAKTRGVAIVMVGHVTKDGSLAGPKVLEHCIDCSVLLDGDADSRFRTLRSHKNRFGAVNELGVFAMTEQGLREVSNPSAIFLSRGDEVTSGSSVMVVWEGTRPLLVEIQALVDHSMMANPRRVAVGLEQNRLAILLAVLHRHGGLQMSDQDVFVNVVGGVKVTETSADLALLLAMVSSLRDRPLPQDLVVFGEVGLAGEIRPVPSGQERISEAAKHGFRRAIVPAANVPKKPPEGMQVFGVKKLADALSVFDDL

SEQ ID NO: 76327 - protein, 381 aa, Salmonella typhi
MIKKIIFTVTPIFSIPPRGAAAVETWIYQVAKRLSIPNAIACIKNAGYPEYNKINDNCDIHYIGFSKVYKRLFQKWARLDPLPYSQRILNIRDKVTTQEDSVIVIHNSMKLYRQIRERNPNAKLVMHMHNAFEPELPDTDAKIIVPSQFLKAFYEERLPAAAVSIVPNGFCAETYKRNPQDNLRQQLNIAEDATVLLYAGRISPDKGILLLLQAFKQLRTLRSNIKLVVVGDPYASRKGEKAEYQKKVLDAAKEIGTDCIMAGGQSPDQMHNFYHIADLVIVPSQVEEAFCMVAVEAMAAGKAVLASKKGGISEFVLDGITGYHLAEPMSSDSIINDINRALADKERHQIAEKAKSLVFSKYSWENVAQRFEEQMKSWFDK

SEQ ID NO: 76328 - protein, 555 aa, Salmonella typhi
MAQFVYTMHRVGKVVPPKRHILKNISLSFFPGAKIGVLGLNGAGKSTLLRIMAGLDKDIEGEARPQPGIKIGYLPQEPQLNPEHTVRESIEEAVSEVVNALKRLDEVYALYADPDADFDKLAAEQGRLEEIIQAHDGHNLNVQLERAADALRLPDWDAKVEKLSGGERRRVALCRLLLEKPDMLLLDEPTNHLDAESVAWLERFLHDFEGTVVAITHDRYFLDNVAGWILELDRGEGIPWEGNYSSWLEQKDQRLAQEASAEAARRKSIEKELEWVRQGAKGRQSKGKARLARFEELNSVEYQKRNETNELFIPPGPRLGDKVIEVSNLRKSYGDRVLIDDLSFSVPKGAIVGIIGPNGVGKSTLFRMMSGQEQPDSGTITLGETVKLASVDQFRDAMDNSKTVWEEVSGGLDIMKIGNTEMPSRAYVGRFNFKGVDQGKRVGELSGGERGRLHLAKLLQVGGNVLLLDEPTNDLDIETLRALENALLEFPGCAMVISHDRWFLDRIATHILDYQDEGKVEFFEGNFTEYEEYKKRTLGAEALEPKRIKYKRIAK

SEQ ID NO: 76329 - protein, 317 aa, Salmonella typhi
MRVLIVKTSSMGDVLHTLPALTDAQQAIPGIQFDWVVEEGFAQIPSWHSAVDRVIPVAIRRWRKAWFSAPIKAERIAFHRAVCAYQYDAVIDAQGLVKSAALVTRLAHGIKHGMDWSTAREPLASLFYNRKHHIAKQQHAVERTRELFAKSLGYDKPQSQGDYAIAKHFLHCQQAVSDPYAVFLHATTRDDKHWPEANWRELIGLVGNTGLRIKLPWGAPHEEARAKRLAEGFDYVDVLPRMSLEEVARVLAGAKFVVSVDTGLSHLTAALDRPNITLYGPTDPGLIGGYGKNQMACCSPEQNLANLDATSVFGKIH

SEQ ID NO: 76330 - protein, 46 aa, Salmonella typhi [sequence omitted]

SEQ ID NO: 76331 - protein, 119 aa, Salmonella typhi
MVKLAFPRELRLLTPAHFTFVFQQPQRAGTPQITILGRLNSLGHPRIGLTVAKKNVRRAHERNRIKRLTRESFRLRQHELPAMDFVVVAKKGVADLDNRALSEALEKLWRRHCRLARGS

SEQ ID NO: 76332 - protein, 91 aa, Salmonella typhi; identical to SEQ ID NO: 43000

SEQ ID NO: 76333 - protein, 21 aa, Salmonella typhi
MNRISTTTITTITITTGNGAG

SEQ ID NO: 76334 - protein, 591 aa, Salmonella typhi; identical to SEQ ID NO: 75568

SEQ ID NO: 76335 - protein, 230 aa, Salmonella typhi
MKSLNTLVILTSVISTSVFAGAYVENREAYNLASDQMEFMLRVGYNSDMGAGIMLTNTYTLQRDDELKHGYNEIEGWYPLFKPTDKLTIQPGGLINDKSIGSGGAVYLDINYKFTPWFNLTVRNRYNHNNYSSTDLNGELDNNDSYEIGNYWNFIITDKFSYTFEPHYFYNVNDFNSSNGTKHHWEITNTFRYRINEHWLPYFELRWLDRNVGLYHREQNQIRIGAKYFF

SEQ ID NO: 76336 - protein, 38 aa, Salmonella typhi [sequence omitted]

SEQ ID NO: 76337 - protein, 167 aa, Salmonella typhi; identical to SEQ ID NO: 56103

SEQ ID NO: 76338 - protein, 148 aa, Salmonella typhi; identical to SEQ ID NO: 43741

SEQ ID NO: 76339 - protein, 13 aa, Salmonella typhi
MTRVQFKHHHHPD

SEQ ID NO: 76340 - protein, 167 aa, Salmonella typhi; identical to SEQ ID NO: 56103

SEQ ID NO: 76341 - protein, 86 aa, Salmonella typhi; identical to SEQ ID NO: 74903

SEQ ID NO: 76342 - protein, 93 aa, Salmonella typhi
MNENQIEGIKMKKVLALVVAAAMGLSSAAFAAETATPAKTAAPAKTTQTTQHHKKQHKKTVEQKAQAAKKHQKKDGKKAPAKSTSKTTSQPAA

SEQ ID NO: 76343 - protein, 407 aa, Salmonella typhi; identical to SEQ ID NO: 73613

SEQ ID NO: 76344 - protein, 59 aa, Salmonella typhi; identical to SEQ ID NO: 73600

SEQ ID NO: 76345 - protein, 91 aa, Salmonella typhi; identical to SEQ ID NO: 43000

SEQ ID NO: 76346 - protein, 257 aa, Salmonella typhi
MTIEVQRWEDKFEIKPGVWVYVPSVEARKVGGKILQAVRNKWIPPLYFYHLRTGGHLKAARLHLKSDFFAVVDIKQFFQSTSRSRITRDLKSYFTYSQAREISTFSTVRNLSHSPHKHVLPFGFVQSPILATLCLDKSYFGSLLRRLNKHHDLKLSVCMDDVIISSNNLAQLQAAYDEALVAMRKSGYQANMSKTQAPSSKISVFNLTLSKGVMKVTSQKMSDFLIDFYSSNYEPHRIGVKNYVEAVNPGQAKLFKL

SEQ ID NO: 76347 - protein, 128 aa, Salmonella typhi
MAYSEKVIDHYENPRNVGSFDNNDDNVGSGMVGAPACGDVMKLQIKVNDEGIIEDARFKTYGCGSAIASSSLVTEWVKGKSLDEAQAIKNTDIADELELPPVKIHCSILAEDAIKAAIADYKSKREAK

SEQ ID NO: 76348 - protein, 164 aa, Salmonella typhi
MRLTSKGRYAVTAMLDVALNSEAGPVPLADISERQGISLSYLEQLFSRLRKNGLVSSVRGPGGGYLLGKDAGSIAVGEVISAVDESVDATRCQGKGGCQGGDKCLTHALWRDLSDRLTGFLNNITLGELVNNQEVLDVSGRQHTHDAPRASGRAQDAIDVKLRA

SEQ ID NO: 76349 - protein, 218 aa, Salmonella typhi
MWRVFCLELRVAFRHGADIAGPLWFFLMVITLFPLSVGPQPQLLARIAPGIIQVAALLASLLALERLFRDDLQDGSLEQLMLLPVPLPAVVLAKVLAHWAVTGLPLMMLSPLVALLLGMDVYGWKIMALTLLLGTPALGFLAAPGVGLTAGLRRGGVLLGILVLPLSVPVLIFATAAMDAASMHLPVDGYLAVLGALLAGSATLSPFATAAALRISTQ

SEQ ID NO: 76350 - protein, 82 aa, Salmonella typhi
MTTITLVNEQNSTGNPFSAHMLCEQRAIQEITYELLQSQQHVSNKDIIAKLIEKLETEKDVVQLDIYRNALEAVFFQTPDDI

SEQ ID NO: 76351 - protein, 43 aa, Salmonella typhi
MPLQQGGYMTLTQLGVAFWHDLAAPIIAGIIASVIVNWLRDRK

SEQ ID NO: 76352 - protein, 559 aa, Salmonella typhi; identical to SEQ ID NO: 75373

SEQ ID NO: 76353 - protein, 99 aa, Salmonella typhi
MTELEKLQASAEQAAALLKAMSHPKRLLILCMLCGSPKTSAGELARITGLSPSATSQHLARMREEGLIDSQRDAQRIHYFIKNEAVNTLIATLKNLYCP

SEQ ID NO: 76354 - protein, 134 aa, Salmonella typhi
MRSVLTISVGLLFGLALSSVAHANDHKILGVIAMPRNETNDLALKIPVCRIVKRIQLTADHGDIELSGASVYFKTARSASQSLNVPSSIKEGQTTGWININSDNDNKRCVSKITFSGHTVNSSDMARLKVIGDD

SEQ ID NO: 76355 - protein, 78 aa, Salmonella typhi; identical to SEQ ID NO: 43145

SEQ ID NO: 76356 - protein, 79 aa, Salmonella typhi; identical to SEQ ID NO: 42723

SEQ ID NO: 76357 - protein, 156 aa, Salmonella typhi
MNLNATILGQAIAFILFVWFCMKYVWPPLMAAIEKRQKEIADGLASAERAHKDLDLAKASATDQLKKAKAEAQVIIEQANKRRAQILDEAKTEAEQERTKIVAQAQAEIEAERKRAREELRKQVAILAVAGAEKIIERSVDEAANSDIVDKLVAEL

SEQ ID NO: 76358 - protein, 177 aa, Salmonella typhi
MSEFVTVARPYAKAAFDFAVEHQSVERWQDMLAFAAEVTKNEQMAELLSGALAPETLAESFIAVCGEQLDENGQNLIRVMAENNRLNALPDVLEQFIHLRAASEATSEVEVTSATALSEEQLSKISAAMEKRLSRKVKLNCKIDKSVMAGVIIRAGDMVIDGSVRGRLERLADVLQS

SEQ ID NO: 76359 - protein, 95 aa, Salmonella typhi; identical to SEQ ID NO: 73152

SEQ ID NO: 76360 - protein, 63 aa, Salmonella typhi
MKAKELREKSVEELNTELLNLLREQFNLRMQAASGQLQQSHLLKQVRRDVARVKTLLTEKAGA

SEQ ID NO: 76361 - protein, 464 aa, Treponema pallidum
MDAVGYEVFWNETLSQIRSESTEAEFNMWFAHLFFIASFENAIEIAVPSDFFRIQFSQKYQEKLERKFLELSGHPIKLLFAVKKGTPHGNTAPPKHVHTYLEKNSPAEVPSKKSFHPDLNRDYTFENFVSGEETKFSHSAAISVSKNPGTSYNPLLIYGGVGLGKTHLMQAIGHEIYKTTDLNVIYVTAENFGNEFISTLLNKKTQDFKKKYRYTADVLLIDDIHFFENKDGLQEELFYTFNELFEKKKQIIFTCDRPVQELKNLSSRLRSRCSRGLSTDLNMPCFETRCAILIKKIQNYNSTYPHKAIHISDDVVRLVSENISSNIRDLEGALTKIIAFIEVSGSITIDIVPSLLKEFFLSARPKHITVETILHVVADHFNISYSDLKGKKRNKSVVYPRQIAMFLSKELTELSTTELGIEFGGRDHSTVIYGCQKIEGEILTNPSLQANLDLLKSKVQDSIR

SEQ ID NO: 76362 - protein, 371 aa, Treponema pallidum
MKILCEKEAFLKEISTAQEVISNKKNTSIFSNVLLAAQGALLTIRATDTKVTFETSIPVNVLAEGTTTVFCDKLVNVVSALPTKEIELTLCEEQLVITPPNKKISFQLRTLSHESFPCFPQNEGGVSLAVPTSDLRNMINHTVFAVSEDSTRHFINGVHVDFQYGNIICVSTDGKRLAYIEKKGESSPQSFSGVIVPTKILGIVNRKLTPEGSVTLCITSQHVYFFFGGYKFSSVLIEGQFPNYKRVIPDHQERSFCVGRVELMEALKRVSLLVEQKSHRIFITIQQGLLTLSSKAHTQENEIGDAQEEIACAYTGESEVIALNYLYLEEPLKVFTSKEVQVEFTDPAKALTLRAVPNTDCFHIIMPMQTE

SEQ ID NO: 76363 - protein, 813 aa, Treponema pallidum
MEEISTPEGGVLVPISIETEVKRAYIDYSMSVIVSRALPDVRDGLKPVHRRILYAMEEKGLRFSGPTRKCAKIVGDVLGSFHPHGDASVYDALVRLGQDFSLRYPVIHPQGNFGTIGGDPPAAYRYTEAKMARIAESMVEDIKKETVSFVPNFDDSDVEPTVLPGRFPFLLANGSSGIAVGMTTNMPPHNLREIAAAISAYIENPNLSIQELCDCINGPDFPTGGIIFGKNGIRQSYETGRGKIVVRARFTIETDSKGRDTIIFTEVPYQVNTTMLVMRIGELARAKVIEGIANVNDETSDRTGLRIVVELKKGTPAQVVLNHLFAKTPLQSSFNVINLALVEGRPRMLTLKDLVRYFVEHRVDVVTRRAHFELRKAQERIHLVRALIRALDAIDKIITLIRHSQNTELAKQRLREQFDFDNVQAQAIVDMQMKRLTGLEVESLRTELKDLTELISSLEELLTSPQKVLGVVKKETRDIADMFGDDRRTDIVSNEIEYLDVEDFIQKEEMVILISHLGYIKRVPVSAYRNQNRGGKGSSSANLAAHDFISQIFTASTHDYVMFVTSRGRAYWLKVYGIPESGRANRGSHIKSLLMVATDEEITAIVSLREFSNKSYVFMATARGVVKKVTTDNFVNAKTRGIIALKLSGGDTLVSAVLVQDEDEVMLITRQGKALRMSGREVREMGRNSSGVIGIKLTSEDLVAGVLRVSEQRKVLIMTENGYGKRVSFSEFSVHGRGTAGQKIYTQTDRKGAIIGALAVLDTDECMCITGQGKTIRVDVCAISVLGRGAQGVRVLDIEPSDLVVGLSCVMQG

SEQ ID NO: 76364 - protein, 604 aa, Treponema pallidum
MPKISIHEALFFELLGERCDDDTLERRLRSAKAELECSSFSVREDKEGGSLSPGGEVCDPVQRTRGQASCVREGAFDARLLKIELNDTNRPDLWSTAGLARLLRVHAGGASRAAQYRAFLSDRCTVRDSYGRCVVVDARLQTIRPFIAGFVARGTGLSEVRLWDLIQTQERLASNFGRRRCTLSLGCYRAQDICWPLAYRAVLLAEVSFTPLGMSMPLSGEQILTQHPKGREYGHLLKDYSFVPLLVDARGEVLSLIPITNSASLGAVVTGDTELFIECSGTDMCAVLVAVNSLACDLSDMGMQIEPVQITYSFDTPWGRSVTTPFYFQEKREVAHEQIDRLLGMPLPVADITEAFARMDCAVQVKQGTYVVEPAAYRNDFLHAVDLIEEVMLGRTLDRFSPQVPCSFTVGRLSDLTLLTRKIKHLLVGFGYQEMIFHYLGSAREFCTRMRCTADDLIEIENPLTESYRFVRRSIIPCLLSAELKSAHALYPHRIFEIGKVAFCSPHGEHGTCTQQSLGFLNASQEASYNEVASLVSGLLYCLKLPYQVEEAQDPRFVLGRQASICVHGSRVGIFGEIHPQVLSNWDIRMPCFAGELDVGALLP

SEQ ID NO: 76365 - protein, 857 aa, Treponema pallidum
MLGNLMLGPYCRSSLWRELSWQEVTGIVAPDTIAYLKARAQDHPFLLAHERACAAIRLGMRMYGDGYNICVIGASGTGKRTTLQYLLKDFVPRPEQMWDIAYAYNFVHPHEPQVLQFPAGEGMPFATALRRSVNAILNTAQDIVKSDAFLRERRTLLADIETRECAELSRIEAELYTRGFRVRWHRKRGTYSFDLVPLLKGKDSSFEALHDLASRAKLSRCVVHELHARYRLSCDEVSSLLHTLRTARRAARRRLAQYYRARLRLIILEQMACIKKRVACYAPVFSPPPVSCAAEQTEREKTSSSRLIEVPHEFEEMRARIISYIERIQTDVQVRVQCLMSMRISALVKKRFFDRYTLNFVCVHTEHAGYVFTEHQPNLANLCGSIESKGNEGDTLENGHLRIRAGALHRAHAGVLIVQLEDLLAEEEAWTHLKRALRTKQVLLPAGSSQSQGMLRPEGVPLTCKLVLVGEPCSFERLSQEDSSFRELFKVCAEFDTSMPNSDKNQVALIAYLDRVVARYGTFSLDSSAYARLLAYAEELAESHTRLSTSFVQIADLVLESHAVAVDMHPDVSVITAHVVQEALNRRQYVCSRARERFQRMIACGELLVEVQGYRIGRINALAIEEHCGHSFGIVISLTAQASAGKEGVMNIEREAGLSGEIYDKAHLIITSLLREKCLSAFADAAFDPAVDDLGKGQDSFPLCLSAALCFEQSYHGIDGDSASAAEFLVLLSAIGRFPLRQDRAITGSVNQLGQVQAIGGVSEKISGFYDVCALNGLTGMQGVLIPKSSCAQLFLPERVQDAVRAGTFHVWAVCTIDDALELMVPDDLKEQGSAQLYQCVRARLRDFYVTVKGHCE

SEQ ID NO: 76366 - protein, 707 aa, Treponema pallidum
MRKCAMRIMRRLMLFLMCLCAALFAQELVREQSVTKSADITVLLDTSGTILPYRSVVSGSVLKDIATRFVRLGDSFHIISFSATPRHEISQVIRSEFDLSQVVSRFMILHQLGLYSDFLTALDFARTHLRALPAAHEKILIVVSDGIFNPPARTAYKNYNKDQVKINLARAAADLRREQVRVFYIKLPFPQDIQIRDLDDNLLTDLQKTDDVQISAVGSFAEGQTRRPKLDTVGVVSDQTGGVADNHAVATHGREDGTVQGVVGSHVEVARTQDRRSNADPAKREGVRPSSEATDVSREFTEDLGIRVSPVDSDGSVRFSEKERTLPVLHFPRVLEVQGKYAECMFEVENSTDAPVLLHLERVIFDNGVETDIVSVQTESCAVASGARAMLRTTFLLPKRYHEEGTYQVTMRVQFADNVRVFPQVATAELRVSPLPFLGLVRRGIHGVLSSVGLTHAFGYVLDMVGLSRTGFGAVLLPLFALAIFLVLVSAVVCRSKRVLSRKSWRGSPRTENGCQGPGSMSDFRAHSVKEQRQDQERVYAGMERIVSQRKSDVQDRLSVLNAATAFGRDRVSFSPRVTRAEHGCSRSGMTEIFVFDQTRAIGKRNIHVMKAGTRLGVGGHKGDDFLIFLVPFPRRLAQVYFDGEVYHLAILKPRYFPYEESSVVHDCVGRVVTLVSDRGYHVPFTFRQYEDPAVRLNNLLTSIEYA

SEQ ID NO: 76367 - protein, 1023 aa, Treponema pallidum
MSTLLHGFEIIWRHSLAELSAVGVYARHKKTGLELYHILNEDPENLFAFCFMTAEEASTGVAHILEHSVLCGSQHYPLKDPFLILAKQSVKTFLNALTFPDKTVYPASSLVETDYFNVMSVYADAVFFPLIEEWTFKQEGHRFEFNEHNQLTLQGVVLNEMRGVYADFHTLVYKHATHATTRGSVYAHDSGGHPTVIPRLTYESFKAFHKKHYHPSNCKLFLYGNIPTEKQMAFIEDKCLSKFSARKALPPIPPIPAYQSPRTYTGYAPASEGMDLTRCAVLLSWLLPESDKAEQLMDVFLLEHVLLGHDAAPLAQALLESELGEDLYAYNGSHIDLKRMLFFVGMTGVQHTQVDALKACVFETLESLVAHGIPPQEVETALNALEFSNTEVRRSDGPFSLVLMQRSLRGWLHGAGPESSLRYIPALQALREKVHHHPHYVENLILTHLLRNPQYTVLSVHPDPDFSKKLDEQLEKYVQDFSRTLTQPAAARLRADQESLRVRQTTPDPEELLALLPHIKREQLPVPTPELSETMQFFGSVPVLVHELATNDITYLHLAIPADMLSVKEAQLLPLYGYALTGMGTETHHWSVVSAEIARLTGGFAARCIVAGDQGSEILPLLRGQNTLQRSDIVGRAWLVVSVKMLSRFIVQAISYVCAHVRSLSFTDTRRLKDILAQYKNDLDSAAMHSGHSIALAKANARVNAAKAVEELWTGVTQIRLVRALWTECTETVASPSLAAKLKALHEKLLTAGVIGCVCGTETSLHTALDALAKPLACFRAPLSTYFIHHTSAPTAHEQQIPSAHGVLFQEALQHMRTRNMLTLLPAPVQVGFAALSLAHPRLPLERRGVEQVFARYLSTEPFWEKIRTIGGAYGAFTLPDPVHGIFSSLTYRDPNPLHSLDVIFKTIEHLHADHKGTSSLFNQKTMERLIIGAYSTAVTPETPEHKSFASFLRFLNGTTETERIAAIEHILDARVTDMHLCTQLLWAQRTCAEAAVVSTATSIREAATLEPYFSKLEAEPPL

SEQ ID NO: 76368 - protein, 425 aa, Treponema pallidum
MSCYRVEGGFPVSGCIRVCGNKNAALPCIAAAVLTQEPVLLQNVPDIEDVAVMLTIFRAFGGSVERRGNHEYMLHLPQLQTCEVPCEAAQKVRASILFAGPLLARGRKAVLPPPGGDVIGRRRLDTHFLALAALGAQVRLDGVFTFSANKLVGCDVFLDEASVTATENVLMASVLAEGVTVITNAASEPHVQDLCHLLNAMGARVSGIGSNVLTIEGVSALHGTTYTLGADFMEVGSLIGLAVVTRGALTISDVNVRDLRPLGFAFKKLGVIWSEQEHAVSVSASQDLRVNYDFGGMIPKIDDGPWPAFPPDLTSIMTVVATQVEGVILIHEKMFESRMFFVDKLITMGARIILCDPHRALVSGPSALHGSDLVSPDVRAGMAMVLAACCARGVSIIRNVYQIERGYERLVERLQAIGVRIWKEG

SEQ ID NO: 76369 - protein, 544 aa, Treponema pallidum
MAKQLLFNEEARKKLLSGVEQISSAVKVTLGPKGRNVLLEKGYGAPTVTKDGVSVAKEVELEDPFENMGAQLLKEVATKTNDVAGDGTTTATVLAYSMVREGLKAVAAGMTPLELKRGMDKAVAIAVDDIKQNSKGIKSNEEVAHVASVSANNDKEIGRILASAIEKVGNDGVIDVDEAQTMETVTEFVEGMQFDRGYISSYFVTDRDRMETVYENPYILIYDKSISTMKDLLPLLEKIAQTGRPLLIIAEDVEGEALATLVVNSLRGTLKTCAVKAPGFGDRRKEMLEDIAILSGGQVISEDLGLKLESADIALLGQAKSVKVDKENTTIIDGSGKSKDIKDRIEQIKKQIEASTSDYDSEKLKERLAKLSGGVAVIKIGAVTEVEMKEKKHRVEDALNATRAAIEEGIVAGGGLALIQAAAALEKADLSGLTPDEAVGFKIVRRALEEPIRQISENAGIDGAVVAEKAKEKRGIGFDASKMEWVDMIKVGIIDPAKVTRSALQNAASVSGLLLTTECAIAAIPEKSSSTPPAPDMGGMGGMY

SEQ ID NO: 76370 - protein, 310 aa, Treponema pallidum
MSQEIGIKLADGSFFPLFTAEGAQRTTLELVTANDQQSRALLSFFKRVSPGDGEASVTSAELEPMGALSIDTLSVAAAGGATIRLEVECDGSRCRARATDVGSGAFQETSFSVLERSSGDATPDEQPAAQIEHVSSFPEDEGGDGSTLTRRRRILLAVCAFLILLGGVLVGWVLYMHGASRPAVVPSQKVELPRSSAHVAARELERTAVEARVVDLPSETALPETHKEKDVPPASPGAETATSAAAEPVEESGSGSVKVVRYTVKRGDTLWDLARSYYKTPWRYMRIAEFNRLKNPDHIVAGTSIEIPSR

SEQ ID NO: 76371 - protein, 630 aa, Treponema pallidum
MGFRFSDYDVIVVGGGHAGAEAALAAARMGEHTLLITQTIDSIGRLSCNPSIGGISKGNIVREIDALGGEMGKFADACMIQYRLLNKSRGPAVQAPRIQADKFLYAQKVKYTLECTQHLHLYQDTVVDVVCSNTTDAGYVAYGAAHAVVTARGRRISARAVVLTTGTFMEGRVYIGEYEAPEGRLGEHAAEGLGAALRKKGFQMGRLKTGTPARVLRKSVDLSVMEKQEADAIMRPFSFAHVEINRPHADCYINYTNERTHQLIRENFHRSPFFSGRIKAVGTRYCPSIEDKVRKFPDRIRHQLYIEPEGLDTEELYINGLSSCLPEDIQDEMIRTIPGMERAVITRPAYAVDYAVLFPVQLGIDLQTKRVSGLFSAGQINGTSGYEEAGGQGIIAGINAALYARSTKTKEEYHPFVLKRDEAYIGVMIDDLVTQGIDEPYRMFTARAEYRLKLRHDTADERLTEKAYAIGLQKKSAVETLQKKMRTKHEILHLLQTNKVSLTHANAYVQLKPHIGKSFAATLRDPVIPLGLIASLNEQIAQFPLEVFQSVGVEIRYEHYIAAQDQRIAQVEKMEGIKIPAHFDYARISGLSVESRTRLEHVRPDTIGQVGRMRGIRPSDVMLLLAHLKR

SEQ ID NO: 76372 - protein, 351 aa, Treponema pallidum
MIEKLEELRAQWRKLQQEVENPSLFSSTQSYRERMRDHAYLSRLMEEYDRYLLTEKQLEDAHVLIQDESDADFKDVIRQEIRTLEAALHTSQKRLKTLLIPPDSLQEKNIIMEIRGGTGGDEAALFAADLFRMYTHYAESKQWRYEVLAVSETELGGFKEITFSISGRDVYGSLRYESGVHRVQRVPSTEASGRIHTSAVTVAVLPEMEETEVDIRAEDVRVDVMRASGPGGQCVNTTDSAVRLTHLPTGIVVVCQDEKSQIKNKAKAMRVLRSRVYDLEESKRQVARARERKSQVGSGDRSERIRTYNFPQNRVTDHRVRVTLYKLDAVMQGALDDIIEPLCIASRESVI

SEQ ID NO: 76373 - protein, 348 aa, Treponema pallidum
MYCVSRECNLVQELCTIRQARMYARALFQDAPCLRGQNTPLLDADLILSKLLAKPRAWILAHQQDEIASVAHEFKRLVHLRCRGRALAYLTREKEFFGLRFRVTRATLIPKPDTELLVESVLAHVASQMMKPRSVSVHKDTSALPVLKIFEACTGCGCIAIALMHMLRARGTPPLYVIASDICMRALAVARYNARRLLDVSANSRVRFVHADVRAPIPFFSPSEGTDVVQERGVCVPYDVICANPPYVPSAQARALLQDGRGEPLGALDGGADGLDLVRAFAHHSAAALKEGGCVFCEVGSNHAQRAARIFQAAGFATVKISKDLSGKERLISGILRSQSRAVTAPSG

SEQ ID NO: 76374 - protein, 351 aa, Treponema pallidum
MMESSTILQRRALFNEAGDIELHKRRMVGGNTTNLNDFNNMKYPWVSKWYRQAMNNFWIPEEINMSSDVQDYRNLSAIEKTAYDKILSFLIFLDSIQTANLPNIGQYITANEINLCLTIQAFQEAVHSQSYSYMLDTICSPEERNDILYQWKDDEHLLARNKFIGNLYNEFQDDKSVLALLKVAIANYVLEGIYFYSGFMFFYNLGRNNKMPGSVQEIRYINRDENTHLWLFRSIIQELQKEEPQVFTARNVRLFRDMIREGCEQEIKWGDYVIGDQIPGLNRHMVADYIRYLGNLRCENLGFEPLYEGHRVEPESMSWVSQYSNANLIKTDFFEAKSTAYAKSSAMVDDL

SEQ ID NO: 76375 - protein, 593 aa, Treponema pallidum
MSTPVRISEMVLRDAHQSLHATRMTTEDMLPICDKLDRVGYWSLEAWGGATYDACIRFLNEDPWERLRALKSRLPKTPIMMLLRGQNLLGYRHYADDVVDAFVEAAARNGVDVFRIFDALNDPRNLSQAARAAKKTGKHVQMAISYATTPYHTAEKYVELAKEYARFGADSICIKDMSGLLTPYGAYDLVSAIKKSVDLPVELHTHATTGMSVATLVKAAEAGVDVIDTAIASMSMGTSHSPTETLVEILRHTGRDSGLDINLLLEIAAYFRQVRKCYAQFESSFLGADTRILVSQVPGGMLSNLENQLREQGALDKMDQVLKEIPLVQKDCGYIPLVTPTSQIVGTQSVLNVLFGRYHRLTAETRRLLTGQYGRTPASCDAGLVERALKEEKLSQSLVCRPADALPHELDRMRSEARAAGAQDTIEDVLTYAMFPKIAPTFFASRAQGPISFRGKGQGQKQKGESAGSVASYVATVNGTAYTVVQEGAVLRVNGTPYTVRVEAGPSVASGTSQGTVTTAKVGACTTLPAPVAGSVVKHTVQDGATVNSGETVLMVESMKMELEVKATAAGTIHFLIAPGAHVSAGQVLAEIR

SEQ ID NO: 76376 - protein, 469 aa, Treponema pallidum
MNTRLPLRVLQCVLVGLLVCGPLCAATRRPVRASAPVPMVQSCKDTGARCAPASSMREDMRASHGAAPLLSVRKFLLNTWHSTGLYAFFHGVTQVPDLANPQRTHSVFGYQQALLLVVGLLIIYLGAAKGFEPLLLIPIGFGTVFVNIPGAGMYSEHGMLKLIYDAGVGNEFFPMLIFMGIGALTDFGPLIANPKMAVLGAAAQLGVFLTLFGVAALNFVPGIRYSILDACAIAIIGGADGPTSIYVSAKLAPELMAVIAVAAYSYMALVPIIQPPLMRLLTTRKERLIRMKQLRPVSRIERVLFPLVLLLLSVLLIPAASPLIGMIAFGNFVKECGVVERLSKTMANELLNIVSILLSLGVGSQMTPDKIMNPNALGIIVLGLVAFSVATAGGVFMAKLMNLFLSEKINPLIGSAGVSAVPMAARVSNKVGLEEDPSNFLLMHAMGPNVAGVIGTAIAAGVFISAYGG

SEQ ID NO: 76377 - protein, 438 aa, Treponema pallidum
MPGMPNPTQELKGKIPPHNLEAERAVLGAVLLDDSALSTATEQLSASSFYSAAHQRIFQALVELSDLGQRPDILVLSEHLRSCEALDFVGGSAYVASLTDAVPSAANVEYYTRIVCDAAMRRSLLKVARIITAEAFNDTVSGNIVLETAQREIYDLTNARRVATFKLLKNLIPDLVNTIETRYRNQSDLVGIATGLTALDNLTGGFQNSELIVIGARPSMGKTALAMTMASNIAIRQRIPTAFFSLEMSNLLLMQRLIAAESGVSATNLRKGLLQLSDFGRIQNAAGEMYDAPLYIVDVPNMKLLDLRAVARRLCVQEKIQIIFVDYLGLIVADNPFAPRYEQFAAISQSLKSLARELDIPIVALSQVGRPAEGSAPNLADIRGSGAIEQDADVVMFLHRDRNETETQLILAKQRNGPIGTVELEFQASFTRFVCKSP

SEQ ID NO: 76378 - protein, 156 aa, Treponema pallidum
MKIILNQDVKILGEEGDVKEVAAGYFRNYLYPRNLAVPHNRFTVARFKQRQQDIEMRKSLKRQDAANLKARLEAQPVVIAMPAGTNGKLYGAVTSHTVAEQLACMGFEVERKRVEVPGLTLKCVGNYHVTIRLYEEICAVVPVTIKNQSEADSVSE

SEQ ID NO: 76379 - protein, 99 aa, Treponema pallidum
MAEDHPSVDLDTHLSSPRESEESAPKKNRQFYRKKVCRFCTQKLLADYKDPDTLRRFITERGKILPRRITGTCAKHQRRVALEVKRSRAVALLPFVLTE

SEQ ID NO: 76380 - protein, 176 aa, Treponema pallidum
MADVNHVVLVGRLTRDAELKYTSAGGALCRFSVAINRRRKSGDDWVEEVNFFDIVLWGRQGEVISQYLIKGKQVAVEGELRQSRWEQEGQSRSKVEISATNVQLLGSVLGGAARAEDGEFSSSRVAAESTAGRVRGTSSDSRSPTGDILGEKRGLDATSSLDEADFSSSDLDTVPF

SEQ ID NO: 76381 - protein, 93 aa, Treponema pallidum
MRTYELMAVFSAHEDLFLQGSTAVRALLQENDAVIAREDHIGERELAYPLKKQKRGRYLLFIVQCEPGKVRELDHKLRLRHDLLTHLFVRVDS

SEQ ID NO: 76382 - protein, 393 aa, Treponema pallidum
MSYIILTPGGGMGLMGCECSVPPFETVETGKRSVDADRIMRLSRDGYAFLKVNDLERAESEFGKILQIEADNNYALVGLGDAARKRRAYQEASDYYTRCLQHYPRNSYALFGLADCYKNMRRYVKAVEVWQQYLEQDSHNIAVLTRMADAYRKIHDFQNSRNLYSQVIALDEHNSYALIGLAHLHYDFKKYREALIYWKKLLECAEHSVDIRVLTSIGNCYRKMKLFSQGLPYFQEALKRDPGNFYGFFGMADCYRGMNMQERSIQYWEKILEKDTQNRVILTRIADAYRHIGEYEKAHQTYKRALDIDYDAYATLGLAVLCKLQGRYEEAVVSLDRLVQLDRKNYRVYVELADCYRKLGQKQKALETLRPFQQFGVKNRVVSELMSELEGAS

SEQ ID NO: 76383 - protein, 878 aa, Treponema pallidum
MNTDRYTVKASEALNDAISLAEAENHGQVEEEHLLHALLSQKDGIISPLIEKIGAKPDFLYDELLQCLRRKPRVTGPAAQTRCAPTLSKACARAERLALKNQDEYVSCEHLLLAISETDSNTARLLHSQGITSKTISAALKDIRGSKRVTSQDPESTFQCLEKYCRDLTTLAREEKIDPVIGRDEEIRRVMQVLSRRTKNNPVLIGEPGVGKTAIVEGLARRIVSGDVPESLKGKRLLSLDLGALVAGAKFRGEFEERLKAVIEAVQKSDGGVILFIDELHTLVGAGASEGSMDASNLLKPALARGELRSIGATTLNEYRKYIEKDAALERRFQQVYCVQPTVEDTIAILRGLQEKYEVHHGVRIKDEALVAATVLSDRYITNRFLPDKAIDLVDEAASRLKMEIESQPVELDQVERKILQLNIEKASLLKESDPASKERLEKLEKELAGFLERRAAMQVQWQNEKGRIEESRRYKEELERLRIEETMFSREGDLNKAAELRYGKIPELEKKIMLLTAEVEKKSGLEGQLLREEVCEEDIAKIISMWTGIPVSKMMASEQQKYLQLESVLMQRVVGQDEAVRVISDAIRRNKAGLSDTRRPLGSFLCVGPTGVGKTELARTLADFLFNDERALTRIDMSEYMEKHAISRLIGAPPGYVGYDEGGQLTEAVRRRPYSVLLFDEVEKAHQDVFNIFLQILDDGRLTDGQGRVVDFRNTIIIMTSNIGSEHILSARESRTHTSDLPVPETQSTEEQTLPEQIRGLLHTYFRPEFLNRIDEVLIFKRLTRKHIRLITDIQLQMVVERLESRHIKLRVRDAAKAYLAERGYDDTFGARPLKRAIQTELENALAREILSGRFRGGSTIVVDMCKDALCFTEQTS

SEQ ID NO: 76384 - protein, 538 aa, Treponema pallidum
MCGASLGDCVGSCARVNALYVGRDGVGAENVWGCGRSAVRESAHRDGIYIVGAGFAGSVLAREIQTKKVLGTVIAFLDDDPCKIGSNLHGVPVLGPIFEVARIVRITPHDHALIAIPSISIERLRDIYLTLRAAGFTVIKLLPALAQIIDGTAHLVQTREIDPQDLLTRTPVTINLKKSLAYLCGKRVLVTGAGGSIGSELACQLLSGDVERLYLFGHGENSIYQIDKKIRRLQEEGVGSRTVIVPVIGDLKDAAYVRYLIEQLRCDAVFHAAAYKHVPMMELNPVSVIENNVFGTKFLLDACIACRVKRFVLLSTDKAVDPVSIYGVSKMLNEKNVLYAAERVRDFGHDAAYMFVRFGNVLGSRGSIMPLFIEQIKKGGPVTVTDPAMTRFFMTIPEACSLVLQVGGVGVNGASYLLDMGEPVSIMETAQQLIRYFGYEPDRDIPIHVVGLRPGERLSEPLVSKDERIEPTVYPKVLRLREREPLDFAHLERLWDQLYPYCFPSGEKVRYRHKEGLVRVLCDSCATLKQRYMPNSEA

SEQ ID NO: 76385 - protein, 740 aa, Treponema pallidum
MRGVCDRDRGAHRTRMCKGKSIYMSVFVSDGARTGSVYAQLVRAPRVAGLLLNIDIPSLPDGYSFYTAAHIPGCNAVRCGENTVPVFAHGEVVYAGEPVGILIGPDEHVVRNLVQDVVVHTCAERACASEILCGISEGEPLAQKVAVQGDAETAFKRASHTVCSSCTFEPRVHYFAEMPEVQALPDAHGLHVYAATQWPAHMRKTIAQVLNISEHAVHVHPQQEALSCDGRIWFPSVMASQAALAAYCAKKPVRLSFSFQEYVQYCPKTPKITIAHRTALNAAHAVEGMFVFISLDAGAGNLLIDRMVAHMVHTALGNYEIPRYRIECTAFRSNVGLTDVFNGWADAYTSNALEMHINQLCAELHIFPDEWRVAHMKDTRETQRFARLLAYLCEEGDFRRKHAAFSMVNAVRKAHDTHAWRGIGLALGFQYDPSAMLARSGFSYVLQMTLHTDARIVVHSVPLSDSFKRVVVAFLIREFACLEDAIFFKSSDEAYGVDLLGPSVESVGMRVFARLVRKCVRAIQRQRFRKPLPITVQGSFNTAKKGQVYQVVTVAKSDVSVPDAQSEQCASKVPVTADTSGKCEDMNGFTKMHGMSTHTPAACIIELELDALCVQPKIVRLWFVCDPGYVFCEKDVYRTVSRSITRALSHVSVEKIWERARTPEYVIIDPSDTPPYHVTLLSSNAAARAVGTVAEGIVPAAYYAALRQILPISQNATHKVPFVARDIFYEMFSLSADDSL

SEQ ID NO: 76386 - protein, 148 aa, Treponema pallidum
MNLETVLTPETVSLHLKGSTKEEIIDEMLEMFVRAGRVSDKVAARECVLDRERKMSTGMKHGIAIPHGKTNSVSSLVAGVGVSDSPVDFDSLDQEPCRIFIMTLSPLDVTGPHLQFLAEISLLFKSSEKRREILDATSKAEVIKILTE

SEQ ID NO: 76387 - protein, 354 aa, Treponema pallidum
MSAHRIRARRITRRNVPLAERCSFRIGGAAQFWAEPRSCTQLRALIEEAQRARIPLSLIGGGSNVLIADEGVPGLMLSLRRFRSLHTQTQRDGSVLVHAGAGLPVAALLAFCAHHALRGLETFAGLPGSVGGAAYMNARCYGRAIADCFHSARTLVLHPVRSRAKELPEVRKNAQDKRGECLGLDGGPFTCSSFQTVFARAGDWGYKRSPFQSPHGVELHAGRRLILSLCVRLTPGNPAQIRKHMQEKIADRISKGQFRFPSAGSAFKNNPAFGKPSGILIEEAGLRGTSCGAAQVAPWHGNLIINTGNATAHQVRTLLRVVRQRVFETHGVWLEREIIFSGESVRMTSSSRDS

SEQ ID NO: 76388 - protein, 520 aa, Treponema pallidum
MALRVYNTLTRQQEHFQPWEHGHVRLYGCGPTVYNYPHLGNLRAYVFQDTVRRTLHFLGYRVTYVMNITDVGHLESDADSGEDKLVRSAQAHGHSVLQVAAHYRAAFFRDTALLGIEEPSIVCNASDCIQDMIAFIEQLLARGHAYCAGGNVYFDVRSFPSYESFGSAAVEDVQEGEDAARARVAHDTHKRDARDFVLWFTRSKFVRHALTWDSPWGRGYPGWHIGCSAMSMKFLGPRCDIHIGGVDHIRVHHRNERAQCEAITGAPWVRYWLHHEFLLMQLQKRAVHADMGSSVVSSFSKMSKSCGQFLTLSSLQERGFQPADFRFFLLSGQYRTQLAFSWDALKTARAARRSFVRRVARVVDAARATTGSVRGTSAECAAERVCESRASESELLLTDFRAALEDDFSTPRALSALQKLVRDTSVPPSLCVSALQVADTVLGLGIIQEATASLSAQVPAGDTLPQRPLPSEEWIGQLVRARAHARQTRDFPRADEIRRQLKAEGIELEDTHLGTIWKRV

SEQ ID NO: 76389 - protein, 336 aa, Treponema pallidum
MTFVESMQRRAVLAQKRLVLPEACEQRTLEAARLIVFRNIAAKVFLVGCERDIKNTADRCGIDLTDMVVIDPSVSKHRDQFAERYFQKRKHKGISLAQAAEDMRDPLRFAAMMLDQGHADAMVAGAENTTARVLRAGLTIIGTLPSVKTASSCFVMDTNNPRLGGTRGLFIFSDCAVIPTPTAEQLADIACSAAESCRTFIGEEPTVALLSYSTKGSGGDSDENILRVREAVRILHERRVDFTFDGELQLDAALVPKITEKKAPHSPITGKVNTLVFPDLSSGNIGYKLVQRLSDADAYGPFLQGFAKPLSDLSRGCSVEDIVAACAVTLVQSNGR

SEQ ID NO: 76390 - protein, 120 aa, Treponema pallidum
MDQSFVEEMKVSLVERKRSLARSLTTNNEDFQAIVAGVDPKDSADIASDDMDRKMLESLSAKDLRCLQQIESALLRIEQGRYGKCADCGESIPEDRLRAIPYSLMCIECQSARESKRRAF

SEQ ID NO: 76391 - protein, 72 aa, Treponema pallidum
MTKEEAIEVDGVVKEALPNTTFRVQLQNGHEILAYLSGRMRKHYIRIVPGDSVKVALSPYDLSRGRIMFRER

SEQ ID NO: 76392 - protein, 251 aa, Treponema pallidum
MVTVLSLGGSIVAPETPDIELLGRFVRSVQRYLYEDASRKLIVVSGGGAPARTYQNAYRALRRSLSSPACAKPAHEGDNQEDRELYATAEHVELDWIGIMATRLNAQLLKSLFGILCPNPVVYDPTAANVFSGQVLVAAGWKPGFSTDTDAVLLAERYSAKTVINLSDVAHVYTGDPRSDKDAKALTSLSWDDFLLLVDKEWVPGSHVPFDPVASVRAKKSGIQVICATGRDLPNLERILNRQEFVGTTIG

SEQ ID NO: 76393 - protein, 657 aa, Treponema pallidum
MLSTLNPEQRRAVTTLEGPLLIIAGAGSGKTRVITARIAYMLECGILQSRILALTFTNKAAHEMSERIKALTGKPLRNTTVSTFHAFGVTILREHIHVLGWRKNFSIYDENDKRALIREAAKEVHLLPEVLDTNCVSTLFSAIKMQRKNLKELQHKERALWHEYHTALKLFNAVDFDDLIVLPIQIFSEYPDILASYKSRYHYILVDEFQDTSAQQYRLMKMLATQNICVVGDDDQSIYSWRGAHHDNILSFEKDFPYATEITLEQNYRSTGTILAAANGVIAHNTQRKEKALWSGNDSGKPIEIFNPETERDEAIFIANTILAEQIRASYSFSSFGVLLRTNSFMRIIEDVFLQENIPYRVSGGMSFFQRKEIKDVLSYLRVISNPDDDVNLLRIINTPRRGIGKKTLHLVSDIANTQQCSVFNALNQIINKTHAVDLKESHRTAVENFLQLITQARTHLLSGKNLAYKVRKFVEDIQYFNYLIQEFQKNEHAARFKFLQIEHLVESIEHWEQSSEHGSLYDYLNRVTLLARDNVQKETEGAVSLMTIHASKGLEFPVVFIAGVEAGTIPHERSIEEVHSIEEERRLFYVAITRAKEKLYLTHCRTRKRGGKREERTASPFLDEIPKHLVRAHAPEGKISEEEVTRAFTRIKKLFT

SEQ ID NO: 76394 - protein, 607 aa, Treponema pallidum
MGNTSDWVEMDGLRYVYAAQGAAPMPAPTDNPACDAHMSHDVIARTAQAVFGIRALFPWQRLVIANILDAAHACTHTTPFAAAGSSQTDATRVTHVDDAQPEDNFVGAMQDTRFDQDGVSRAHQVVLLPTGAGKSLCFQVPALFLEGPTLVVYPLLSLMRDQCRRMQAVGFSVILLRGGLNAQERAYMYAQLDRCAEAYGRMRGVTPPAHQTAEFSLADSISFDASLFSDDVSTFSKVVHVDERLAQKRTESRRGVCIIASPEILTQPALRARVRACRVAHLVIDEAHCVSEWGDSFRPDYVRLGELVQDLAPQVVTAFTATASQTVLARIMEVLFGGRAHVLQGTVDRPNIRYTVRTVLCKQTALTQLVARCVRPAVIFCARRVQVERVAHHLRTCLSDTQIRFYHAGLQREEKETVERWFHTHDSAVLVTTCAWGMGVDKPNVRTVIHVDAPLTVEAYVQEVGRAGRDGMRADAFLLWSPRDARSIETLPHAQRVRAHVLRHFAESGRCRRAVLLESLGEQNVCAGCDVCAGTARFVCEDVEALLQFLKKNARRFTVSSLVQHLALHQKVLSVADVRALLYYALETGRVKKKHSLLWGDVLYVAR

SEQ ID NO: 76395 - protein, 593 aa, Treponema pallidum
MKRFIPHRVIHAVCIGLALVGCRKLDSRAGDFELTIIHINDHHSHLEPEPLELAVAGERLRAAVGGYAALVHEIQRLRAESKNALVLHAGDALIGTLYSTLFRGRADAVLMNHAGFDFFTLGNHEFDNGNEGLKEFLHYLEVPVLSANVVPNAASTLHGLWKPSAIVERAGERIGVIGLDTVKKTVESSSPGKDINFIDEIEAVRRATVEMQQQGVNKIILLSHAGFEKNCEIAQNISGIDVIVSGDTHYLLGDESLGRLGLPVVGEYPRKIMSPAGEPVYVVEAWEYGKCLGELNVVFDRTGVITSAVGMPRFLLHTNTLQKKGADRKNYPLEEAEREALLVALRMTPEIIFAQENDQIISVLEEFKKEKEALGAQAIGVITGASMRGGSVHRVPDAQNPQGSVATRFVAETMLSDIQSFGAGKVDCVIQNAGGARSNIQPGEITYNDAYTLLPFSNTLVLVDVSGAELKQIIEDALQFALGDGSTGAFPYGAGVRYEARQEPDEHGKRVIKLEVQKKDGAWVPVDERAPYRLGVNSYIARGKDGYKTLGEIVSTRGAEDTYLRDAESLIKFLRAHKNFRAYTDSNVIFRLK

SEQ ID NO: 76396 - protein, 997 aa, Treponema pallidum
MQEKKTLYLLDAYGLIYRSYHAFARAPLINDSGANVSAVYGFFRSLHTLLCHYRPRYFVAVFDSLTPTFRHVQYPAYKAKRDKTSAELYAQIPLIEEILCALGITVLRHDGFEADDLIATLAKRVAAEHCHVVIISSDKDVLQLVCDTVQVLRLDIDHKWTCCDAAYVQQRWTVMPTQLLDLFSLMGDSSDNVPGVRGIGPKTAAHLLHCFGTLDGIYRHTYSLKEALRTKIVCGKKDAFFSRSLIELRDDVPCVFSLEDSCCIPLDVTSAARIFVREGLHALAQQYRACVQEIDTEATNDTLQMTESSVLTSGRCANECFLSQVEGRASTPEVNSVLKSELKTSAVSGAIPIENRDLRQDVMLARSAGHYRGVTDPVELKRIIDCACANGVVAFDCETDGLHPHDTRLVGFSICFQEAEAFYVPLIVPDVSLHTESTQCTCARSTNVETEKECTEQHGVSASAVQDPAYVQAVMHQLRRLWNDETLTLVMHNGKFDYHVMHRAGVFEHCACNIFDTMVAAWLLDPDRGTYGMDVLAASFFQIRTITFEEVVAKGQTFAHVPYECAVRYAAEDADITFRLYHYLKLRLETAGLLSVFETIEMPLLPILARMEEVGIFLRKDVVQQLTRSFSDLIQQYEHDIFSLAGHEFNIGSPKQLQTVLFQELHLPPGKKNTQGYSTDHSVLKKLARKHPIAEKILLFRDLSKLRSTYTESLAKLADQTGRVHTSFVQIGTATGRLSSRNPNLQNIPIKSTEGRKIRQAFQATVGHELISADYTQIELVVLAHLSQDRNLLNAFRQHIDIHALTAAYIFNVSIDDVQPAMRRIAKTINFGIVYGMSAFRLSDELKISQKEAQSFIYRYFETYPGVYAFSTQVAEQTRKTGYVTSLAGRRRYIRTIDSRNTLERARAERMALNTQIQSSAADIVKIAMIAIQRAFARRPLRAQLLLQVHDELIFEAPAAETAIVKEILFAEMEHAVELSIPLRIHVESGNSWGDFH

SEQ ID NO: 76397 - protein, 525 aa, Treponema pallidum
MAAGFGSRCVPLTYATPKGLLKVFGEPMIERQIRQLHEVGITDITVVVGYLKEAFEYLVDKHDVTLTYNPDYETANNLSTLYHARHLLRNTYILSSDNWLRENIYHSHEWDSWYTAVKTQGKTKEWVLKTGLYDKITAVKIGGRSGWIMYGPAYFSASFSKKIIPLIEAAYMRPENRAWFWEDVFMRNTKSLTMFANKQADNLIYEFESLDELRKFDFAYMVSSDNEWMRVISHVFNQPEMTIGKLRPLKAGMTNKSFIFELNDKPYLFRIPGEGTELLVNRFQEAAVYEAIKPLNICDTLVHLEPARGIKITVFHKDCRSANPSDPADLDLCMRIARKLHQSGICVAHRFDFRSRIAYYEKLALDQYSILYADYRSVREKMNTLLAIVDSVDKPCVLTHVDLTPDNFLLCDGSAQLIDWEYAGMCDPLVDIAMFSLYAHFNTAQIEDLMYRYFQRNPHGEERLRVFCYIALGGFLWSLWTSYKQALGISFGDYGLKMYRYAKEYYEAVQTLLKTHRADHAERKM

SEQ ID NO: 76398 - protein, 461 aa, Treponema pallidum
MAHLPKEYDFSIESLGESKIPSPIYLSHTLGDFIPNYVSDNEYISHELSARLGETVGPFTHKNLMERAGPRQKIFFNPHHVHAGIVTCGGLCPGLNDVIRAIVRCLWGRYGVKRISGIRFGYKGLLPDYNFDILPLTPEVIDNCHKTGGSLLGTSRGGGNRVVDIVDGIERLNLHILFIIGGDGSQKGAKEIADEIKHRNLKISIIGIPKTVDNDISFVQKSFGFDTAIVKATEAVAAAHMEARSQINGIGLVKLMGRESGFIATYTAIASHETNFVLIPEVSFDLDGPNGLLAHLEKRIALRKHAVLVVAEGAGQDLMVNADGVPSGDSQGGSLRVSSGTDASGNKRLADIGLFLKEKIGVYFKEKRIHINLKYIDPSYLIRSAVAAPIDSIYCERLGNNAVHAAMCGKTKMIIGLVHNKFVHLPIDVVVCQRKHVNPEGSLWRDALDATGQPIVMKNII

SEQ ID NO: 76399 - protein, 328 aa, Treponema pallidum
MRIPKWTPATWSVVAGCIGGVLGIVIVGIASPIRIISPTDNGVVTRFGKYHRTLEPGLHYLIPFVEWVYKVPVTKVQKEEFGFRTSKSSEQSHYVNNISHESLMLTGDLNIVDVEWVVQYRIVDPRAWVFNVESQERRQTIRDISKAVVNSLIGDRAILDIMGPERSAIQMRAKDMMNVLLKRIGLGVLVSSVQLQNVVPPQEVQQAFEDVNIAIQDMNRLINEGKESYNREIPKARGDADKLIQEAMGYANERVNRAKGDVARFDSIYAEYVKAPHVTKTRLYLEGLGAILEKTENVLLIDKKLENLLTLKDISKVSKKVVAGTREE

SEQ ID NO: 76400 - protein, 219 aa, Treponema pallidum
MANQTLWLLVARATGQTSLMVCASASIALAAGTPLGILLCVMSPGHVWAHPAWHRVLSSSMNVLRAFPFVILLVVLLPLSRMLTGRTVGTAAAILPLAIAALPFVARVIESALLEVEPGIIQAAVAMGSSMRQLVLKIMLPEAAPACVSGVALMVINLIGYSAMAGAIGGGGLGDVAIRYGYQRFQPEVMTMAVLAILAQVALTQWIGRIICTRIRARR

SEQ ID NO: 76401 - protein, 368 aa, Treponema pallidum
MAVNCGIIGLPNVGKSTIFSALTANVVEAANYPFCTIEPNVGMVTVPDVRLEALAGHFRPKKTVYASIECVDIAGLVKGASQGEGLGNRFLAHVREVGVLAHVVRCFEHTDIVHVHNKVDPLSDIETVHIELALADLASVEKRAVRAQKESRMGKSLQKESTLVLRALDTLREYLEMGKAACMAPLSDEERNAVRDMRLLTMKPHLYVCNTDESGMQYGNDFVRAVQEHARVHNTQAIVMCGKFEAELAQLSDVAEQNAFLQELGLRESGRAALARAVYSLMGLRTFFTAGPEECRAWTIRAGLRAPHAAGVIHSDLERGFIRAETYSFDDLASCGSVAKVREANRVRQEGKEYEVQDGDVIFFKFNV

SEQ ID NO: 76402 - protein, 575 aa, Treponema pallidum
MRPMHIGNLTHLTMLVLCLAIRLCDQFLPFSVQFFTIVGDVGILVLVWSSLASSLNKEKYVRTFLRQYTVPVFLGLLITLLTFVRASVTLTTASGDLYTTLTHIQNITLGIFALIAFKAQKKFAERAVSNPSQTLIVSFLVVIFIGTHLLMFPGATPHSQPLPMLTALFTATSAVCVTGLSVIDVATQLSTWGKAILAALIQIGGLGFMVFSFFGMITIKKKMSLESRLVASHLVSDSDMGSLSHNLKLIIFSTFFIEALSALFLFVGFSQTEGYTIQSLGNAYFHAISAFCNAGFSLYPNSLESFVSNPWITFPIAFTIILGGISFVVIDEVLCRVHGSIKNIFFKGKNILGSLSLNTFVVLKATVLLLAVSFVGIYLLEHTHSMKVYQVGTQYLAAFFQAVTLRTAGFSTIPFSNLRTATLFFMTFIMFVGGASGSTAGGIKLNTAAAIIASFRSFIHHDPKPRIRNLVIQGKQVERSFLILGFGICTVCLAGFCLSLTDNIPFIYLLFESVSAFATVGLSVGITANLSTAGLMILLILMFTGRVGTLTILTAASKEEQDMSVEYACGDLAIG

SEQ ID NO: 76403 - protein, 177 aa, Treponema pallidum
MSVHQGGIRFPLLYLEMETPLGRMCIAERAHTIVYVWFHRVGPRGSPVSGVCAQHVCPGKTALLRETQSQIHAYFCGALREFSVPVTVEGTPFMQRVWGATRNIAYGTTKSYAQLSQDIGCPRAARAVGQALHRNPLLLLIPCHRVISARASIGGFAYGSALKHFLLQQEAAVCACE

SEQ ID NO: 76404 - protein, 335 aa, Treponema pallidum
MAHRMRVVFCCAAALSLCCCSRSRTDAPSLVIYVYDSFASEWGPGPELARRFYAKTGYSVQYVVFEDVTRAIHRAIRDQHTPSSRGADLIIGVDQYTLPLAREADLFSPYQPALPLPHALRIDPHNLAVPYDWGYVAFMFNTDAALPEPQRLSDLANPVYAKSIALADPHTNVLGTIFIGWAHTSLGAAWPAFWNTLYRANLLALAPSWSAAYGLFTAGEAALVLSYTTSAAYHLHHDNHTRFKPLLFPEGHPMHIEGISLVKRTKHARVATQFIDFLLSTEAQELLPLTQWMYPANPDVPLPAAFSAVPQPAACVSLSPQMCRAAAAALHASTP

SEQ ID NO: 76405 - protein, 197 aa, Treponema pallidum
MSKYTVKRASVLCIFGIGLFVPATGTFACGLLLVLGFWVLFFSSLLARFLSQFFMRTRSAPLFEVCLTLSATIMYDNLIQGFFPLVRMMLCPYLFITALSRTLDLCLTAYDADAESLECVGVFGIMIAGISLVRELVAFGCVSLPAPSGFLRIISFPPSNVIRFAATGAGTLISCGIVLWIFRSAGNDHTPSLRSEW

SEQ ID NO: 76406 - protein, 134 aa, Treponema pallidum
MNFSLEFPVRSYELDGYGHVNNAVYLQYFEYARAAFLLHIGFDLKQLHEAGYAFYVTQAHIHYRTAVHLFDTLRARVKPLKLGKASGVFSQTLENQHHVLCADAEITWVCVSRTSGKPTKIPPEYLVPALYPNY

SEQ ID NO: 76407 - protein, 617 aa, Treponema pallidum
MSAFFAPTLRSAPADATIASHQLLMRAGYVRKIANGLFAYLPLGLRVRHKIEAIIREELEAIGCLECTAPVVTPAELWKESGRWYRMGAELLRAKNRLDHELLFSPTAEESFTALVRGDCTSYKHFPLSLYQINAKYRDEIRPRYGLMRAREFTMADAYSFHTDCACLARTYEKFAHAYRAIFRRIGLSVIAVHAHLGAMGGQESEEFMVESAVGDNTLLLCPHCTYAANCEKAVGQRPLPDTHDTHLKDEHEGSDLKTPAAMREVHTPHVKTIEELEHFLHVPAHRCIKTLIYRIDTVPQAAGHFVAVCIRGDLELNESKLEALLRVPSVVLATEQEVYALSGTPVGFIGPVGLAQRAAAAYAARTPAFFPSAAEPASVTSDIPFFSLVADQSVMAMHNAITGALKVDTHLVQVEPGRDFVPDAVADLMLVRAGDRCIHCGAPLYEKKGNELGHLFKLGDKYTRSMHLTFTDEQGVRQFPLMGCYGIGLDRTLASVVENHHDTRGISWPLAISPYAVVLIPIPHTQAPYAAAEALYVQLRTRGVEVLFDDRAERPGVKFADADLIGIPLRVVLSAKTLPRVECTTRCGAHTYFFTQEEASEHIARLLEQLASPESS

SEQ ID NO: 76408 - protein, 269 aa, Treponema pallidum
MTVGVFAALGEEVARVRECLGGVGTERAGLTFYVVSVGALQVVYVCGGVGKVNAALCTQLLISEFGARVLINTGIAGALDERLCVFDVLVSVDAVQHDVDVTAFGYQKGRIPRMDSVEWTANTALRYLVREAFDLCTRDPEWTEGACALSGSGDPPSRVSRLVEGRVASGDLFVSDAQTRARIIREFGAHGVEMEGAAFAHVASVNGVPFVIIRCISDGAGAEQDVSMSYKEFSTRAARRSALLTLRVLERLSALRTSVVASLFPMVVV

SEQ ID NO: 76409 - protein, 308 aa, Treponema pallidum
MGLIARASRIRRSSGVSCEYYRLELQFVQLVESLGIPRAGFLFLTEERMFDLRFPFGIDTTTFYRMRVPTSLLSPGLPAEQWTTLFRQELTELQGYFSSHLFSTLRALHLYPFSAGSVRVYLVLFDTRTDVEEGALAADLHGDASGEERVRSFILAVQARFSFIEASRPVYPRQPELAPSCSQLEFALNNQRMANLFTISINQSALPPAVLQEELSMVRRCCALSNQLLTLVGNDNLASCVASRELRVVVFSSFPVDPELYLNQLTRGVSAYFVNHAENSLLITSSGTTRAQTDVLRFLQYETGETCR

SEQ ID NO: 76410 - protein, 627 aa, Treponema pallidum
MTQALQVPSAPARCRHLRRKNGVLLRIVEKTDRTRYAHALRHGCRHRMCEGVHGTEEDAMGSESAEMDSPHATARPQEQGEDRAWDACGVWVKVPPEAQEPPVSSGGPEDPEAPAQHAPPGARVDAVRHHVYRALPVQSSAEDSRGFVDLSVEDEVLARGCSHAPGGESSSDQAADAPAGDAAYSEVPSFDDLVTRTAQSQDDRVDLSAAMSSVVTEEPPEPRGCSMPCPSGSCDTTEFDDLLSSLSHDAPEYPVDSDPITYSASEPSSEGPVRGAPFSDVDAVAQSLMGDAQVAAQGAQASTSGDASTDLLLKIAQEISSIRADLDQLKGTFSRQAGAEPAQAPATAPAPEGTEAAYSGFFCDDDPDETIALTNDELNNILITSEFTEEDGKDSAADAFGGELSGFESSHIGSAAGDFSYLEEDDHAAARVAQEQWVQQGRATLGNEVFDVKEQGAHADRDAAADPSPVAKDDASPEAQRAHVSSTGLDAAGAEQPLNTENVFDDEDTQREDTSFPLPEEQELDVSVPSLEFSAPHAIETAASESSEVATPVAIESPPQSEAARPAQGDSANLAPPLSKSLADEVRSVLGYMDRLLESLPEEKIEEFARSEYFHTYKHLFDELGIS

SEQ ID NO: 76411 - protein, 134 aa, Treponema pallidum
MEDRLECGIALEGTEVKSVRAGHLSFPDAFAEMRGGELWLKNVHIAEYVHACSFAPNPDRMRKLLAHRDQIARLKRKVEEKGYTLVPLEFYLKAGRVKVALGICKGKKLFDKRAQIKARDNARELSRSLCERHH

SEQ ID NO: 76412 - protein, 235 aa, Treponema pallidum
MFARWRRYSYLARREARRNATAVCSAGVGFFLFYLFITTHVVAAYRIQADSMQPTLSAGDCVLASSLFRFARIKRGDLVLATPLEKEDIGLFKRAMNAVLGFASLQLYRPFGAADRMFSRPQMRRVVGLPGDTVYMRDFVLYVKPHGQQHFLTEFEVSAVSYDVRKGVLPEHWSERLPFSGFMEEMQLDEHSYFVLCDNRIVSSDSRLWGAIDGSTQIKAKAFMRYFPFGAFGVL

SEQ ID NO: 76413 - protein, 495 aa, Treponema pallidum
MTACVCLITIGRKIPDLRARGGTQEDAKPVIKCWFDGVQVGPLSSVRNALGSRAGCARCLRGPFGCSAVDPSFRFFVPPCCVRACGVRRICATDLLRRIFMAKEKFARTKVHMNVGTIGHVDHGKTTLSAAITSYCAKKFGDKQLKYDEIDNAPEEKARGITINTRHLEYQSDRRHYAHIDCPGHADYVKNMITGAAQMDGGILVVSAPDGVMPQTKEHLLLARQVGVPSIIVFLNKVDLVDDPELLELVEEEVRDALAGYGFSRETPIVKGSAFKALQDGASPEDAACIEELLAAMDSYFEDPVRDDARPFLLSIEDVYTISGRGTVVTGRIECGVISLNEEVEIVGIKPTKKTVVTGIEMFNKLLDQGIAGDNVGLLLRGVDKKEVERGQVLSKPGSIKPHTKFEAQIYVLSKEEGGRHSPFFQGYRPQFYFRTTDITGTISLPEGVDMVKPGDNTKIIGELIHPIAMDKGLKLAIREGGRTIASGQVTEILL

SEQ ID NO: 76414 - protein, 102 aa, Treponema pallidum
MARERIRVKLCGFDVELVDQSSRAIVHAVQKAGAEVLGPIPLPTRMHKFTVLRSPHVNKKSREQFEMRTHKRLIDIIEPSQEVMNALMGLELSAGVDVRIKQ

SEQ ID NO: 76415 - protein, 208 aa, Treponema pallidum
MVGLIGQKVGMTQIFDARGCVTPVTVIRVEHNVVVGLKDVERFGYSAVILGTGCMKKSRISKPYAGQFAERIPPVRVMREFRGFTLDVSVGQVLDVRVLESVRYLDVCALSKGKGFQGVVKRWGFSGGRSSHGSKFHREAGSTGQCTSPGRTFKNVKMPGRMGAERVTVQNLRIERIDVGLGVVMVRGAVPGRNKATVFLRTAVKRER

SEQ ID NO: 76416 - protein, 216 aa, Treponema pallidum
MEKTVYSVEGVALRSVELDESVFGLSVNRGVIYYAINSELSNKRLGTACTKGRSEVHGSNTKPYKQKGTGRARRGDKKSPLLVGGGTIFGPKPRDFHYALPKKVKRLAMKSLLSLKAQGDALTVIEDFTVESGKTRDLIQVLRHFAQRERTVFILQNDDALLKRAGRNIPTLSFLSYNRLRAHDLFYGRKVLVLETAVHKIADFYRSKDAAQDGTY

SEQ ID NO: 76417 - protein, 94 aa, Treponema pallidum
MEHTDVVIAPVLTEKSNALRQQGKYVFRVAARATKIQIKQAVTQLFGVTVRRCTVMNVFGKKRRVRHRTGRTSGWKKAIVHVAAGQSIGVLERA

SEQ ID NO: 76418 - protein, 273 aa, Treponema pallidum
MALKMYRPMTAGLRGRVDLCRAELTARTPEKSLTRGKPAKAGRGAGGRISVRHRGGGHKRRYRDIDFKRDLHDIPGTVKTIEYDPNRSVNIALVFYANGQKRYILAPKGLKVGQQVVSGEKVPLEPANALPLGVIPVGFTVHNVELTIGKGGQIARSAGTRAVIAAKDGGYVMLRLPSGEARLVHRRCYATIGELGNEDHMNTALGKAGRARWRGVRPTVRGMAMNPVDHPLGGGEGRGKGRNPVTPWGQPCRGYKTRKKRRVSDRFIVSKRK

SEQ ID NO: 76419 - protein, 95 aa, Treponema pallidum
MSRSVKKGPFVDKKLYKRVVEMNKAANQRNKKVIKSYSRCSTIIPEMVGFTISVHNGKSWIPVYITEEFVGHKLGEFSPTRVFRGHSGSDKKVGR

SEQ ID NO: 76420 - protein, 124 aa, Treponema pallidum
MTERVTYRAKTKFLVASPTKVRPVANVVKCKPYVRAMALLGHLPHKGARLISKVMKSAASNAIDRDKRLDEERLFVRDIQIDEGPRLKRLWCRGRGRGDVQLKRMCHITVVVEESVRTKDGSKG

SEQ ID NO: 76421 - protein, 247 aa, Treponema pallidum
MGQKVSPIGLRLGINKVWSSRWYAGPREYAALLHEDLRIRSMIRSFPECKNADIAEVEIVRHPQRVTVVMHTARPGVVIGAKGVNIEKIGAEVQKRLNKKVQIKVKEIKRMELNAYLVAQNVARQLTARVSFRKCLRQACAGTMKSGAQGVKIRVSGRLGGAEMSRTEEIKEGRTPLHTLRADIDYGFAEAHTTYGSIGVKVWLYSGMMYGNECRKDVGSLLRRSRRESGQKSDELVRDERTHAERG

SEQ ID NO: 76422 - protein, 139 aa, Treponema pallidum
MALSPKRVKYRKVQRGRVKGDATRCNAVDFGAYALVCLEPFWLTSRQIEAARVALNRRIKRGGKLWIRVFPDKPYSKKPAETRMGKGKGSPEYWVAVVKPGTVLFELMGVERALAEQAMLLAGSKLPIKTRFAERVQEI

SEQ ID NO: 76423 - protein, 72 aa, Treponema pallidum
MGRGGCAQLSYSELLSRRRELERKYLDLRFQLVVEHVDNKLMKRILRRQIAAVNTFLRHKELTELEKRGVRE

SEQ ID NO: 76424 - protein, 84 aa, Treponema pallidum
MKRPERRTLVGLVTSDKMHKTVTVRITTKKLHALYKKYVSRSKKYQAHDEENTARAGDVVRIAESRPLSRRKRWRLVEIVERAK

SEQ ID NO: 76425 - protein, 122 aa, Treponema pallidum
MIQVQSRLNVADNSGARLVQCIKVVGGSRRRYASVGDIIVVAVKDALPTSVIKKGSVEKAVIVRVSKEYRRVDGTYIRFDDNACVVIDANGNPKGKRIFGPVARELRDMDFTKIVSLAPEVL

SEQ ID NO: 76426 - protein, 103 aa, Treponema pallidum
MGKTVKIRKDDMVLVIAGKDRGKRGAVLRVLRDVDRVLVQGLNMRKKTIRRKSAQDEGGIMEVEAPIHISNVMIMGKKGPTRVGYRMENGKKVRVCRKTGEVL

SEQ ID NO: 76427 - protein, 185 aa, Treponema pallidum
  MISC_FEATURE (126)..(126): X=any amino acid
MTDHSCIPELKVRYVQQIVPDMMRDFGYSTVMQVPKLLKIVLSMGLGEALANRKLLDASVADLGVISGQHAVKTRARKSIANFKLREGNEIGVMVTLRRSRMYEFLHRLINVALPRVKDFRGVSPXGFDGHGNYSMGITEQIIFPEIDFDKIERISGLNVNVVTSAQTDQEARTLLTKLGMPFRK

SEQ ID NO: 76428 - protein, 61 aa, Treponema pallidum
MATVAMINKAKATPKYATRRYNRCGVCGRPRGYMRRFQLCRLCFRKLASEGQIPGVTKSSW

SEQ ID NO: 76429 - protein, 132 aa, Treponema pallidum
MGVSDPVADMLTKIRNAARAGHEKVDVPSSKLKVEVVKILKTEGYIRNFRKVEEDGSGCIRVFLKYDDNETSVIHGIERISTPGRRVYSGYKTLRRVYNGYGTLIVSTSLGVTTGRHAREQRVGGELICKVW

SEQ ID NO: 76430 - protein, 179 aa, Treponema pallidum
MSRIGKVPVSVPGGVHVRVSSGVVEVEGPKGVLSCAFLPVVTVRVEQEYVIVARCDDSKRARACHGLYRKLLSNMVVGVSEGFSKTLVITGIGYRAEVQGRVLVMALGYSNDFTVLIPSGIEVRVESSTRVIVSGVSKERVGEFAAQLRRLRLPEAYKGKGIRYDYETIVRKVGKSGVK

SEQ ID NO: 76431 - protein, 120 aa, Treponema pallidum
MLRKCSDKQRKRMKRKVHIRKRVYGTAVRPRMTVFRSNRNISVQVIDDDARSTLASVSTLEKDFVLLRANVSSGLQIGEEIGRRLLEKHIDTVIFDRNGYLYHGVVAAVADGARKAGVKF

SEQ ID NO: 76432 - protein, 172 aa, Treponema pallidum
MDRHRDFGKDRLRDKEFTEKLIKLNRTAKVVKGGRRFSFSALTVVGDQKGRVGFGFGKAGDVSEAIRKSVERAKRSMVLFPLKDGTIPHEVQAKFKGSLVLLRPACSGTGIIAGGTVRAIMEVAGATDVLSKSLGSNSAINVVRATFGAVAQLMDARKLARERGKALVDMWG

SEQ ID NO: 76433 - protein, 153 aa, Treponema pallidum
MADFHLIAPKGANRARRIVGRGSSSGRGTTSGRGTKGQQARAGHKAYVGFEGGQMPLYRRVPRRGFSNCAFKKEYAVVNVGALEFVYAPGETVNRQTLIEKGLVKGRVPFIKILADGELTKSIVVRVDRVSARAQEKIQQAGGSVECIEAQER

SEQ ID NO: 76434 - protein, 450 aa, Treponema pallidum
MKQGVFAAVFRIRELRARIFFTLSVLTVFRFGSVLTVPSVDPRALSAYFRSQVRGNAFADYMDFFVGGAFSNFSVFMLGVMPYISTQILMQLSMIVFPSLKKVVEDVGGRRRVQFWTRVATVFVCLIQSSAVTVYANQIPGAIVIQSYAVHLFVTMLTVTSGSMITLWLGEQITARGIGNGVSMIIFSGIVARLPHALAEMWRLQRLGELNMVFVIVAFVMFVGIIVLVVYEQQGQRKIPIHYARRVVGRKMYGGQSTYIPFKINPSGVIPIIFASSFLTFPLQIASSIGPNVRFLHQLAQFLRPNSWWYNAFYVVLIVFFAYFYTQVTLNPTEIAKQIRENGGTIPGIRADKTEEYLQGILNRLVLPGSLYLGMIAVLPTLIQAAFGFPSSISLLMGGTSLLILVGVDLDTMSQIEAQLKMRQREGLGGRGKVLPRICSGYLRKDVYEE

SEQ ID NO: 76435 - protein, 37 aa, Treponema pallidum
MKIRTSVKVICDKCKLIKRFGIIRVICVNPKHKQRQG

SEQ ID NO: 76436 - protein, 121 aa, Treponema pallidum
MARIAGVDLPNKHVSVALTYIYGISRSSARTICEKARISSACLINDLSQDELAVVRAIIDREYKVEGRLRTEVALNIKRLMDIGCYRGLRHRKGLPVRGQRTRTNARTRKGKRKTVAGKKK

SEQ ID NO: 76437 - protein, 126 aa, Treponema pallidum
MAVTKKRKEKKNVYEGNVYIQATFNNTIITVTDLQGNALSWASSGGLGFNGAKKSTPFAAQTVAEAAVQKAQQCGLREVHVFVKGPGIGRESAIRMLGTMGLRVRSIRDITPIPHNGCRPRKTRRI

SEQ ID NO: 76438 - protein, 351 aa, Treponema pallidum
MPRRNLLKGFKRPKVLEFLSENSSECYGKFTASPFETGFGTTVGNCLRRVLLSSIQGYAVTGVRITSFDADGVAHFISSEFEQIPHVREDTLEILNNFKRLRFLLPQGAESSTFTYEFRGAVSLTGKDFAKKFQLEVLSQDLLIMEMMDGAHVEVELHVEFGRGYVPAESHDRYADLVGVIPVDAIFSPVLRVRYDIQSCRVGQRGDYDQLSLEVWTDGTVRPEDAIAEAAKIIKEHFTVFVNFDETALDLEDEPEEDDPAVLELLNTKIADVDFSVRARNCLLTMGIKTLGELTRISEQTLANTRNVGKKSLSEIQGKLQEYNLRLGMADYNHVGVVSRLMRQKEEIDEA

SEQ ID NO: 76439 - protein, 164 aa, Treponema pallidum
MRHRTGFNPLSCMAAHRRALRRNMVTSLFKFERITTTKPKAAEVRRAAERLITRSKSDSVHNRRQVARFIWDKAVLHKLFADIGPRMREREGGYTRILKLGLRQGDAAHVVVLELVDYTFEKSLKKRARTDSVPARKGAGKKDASRVSGTVPDGQSQKIGKKKE

SEQ ID NO: 76440 - protein, 635 aa, Treponema pallidum
MGKIIGIDLGTTNSCVAIMEGGEPVVIQNAEGGRTTPSIIGFTSDGGRVVGQPAKNQMVTNPEHTIYSIKRFIGSRFNELTGEAKKVPYKIVPQGDDVRVEVEGKLYSTQEISAFILQKMKKTAEDYLGEAVTEAVITVPAYFNDAQRQATKDAGKIAGLDVKRIINEPTAASLAFGFNKDSKREKIIAVYDLGGGTFDISILELGDGVFEVKSTNGDTHLGGDDFDARIVQWLEQGFKSDTGIDLGNDRMALQRLREAAEKAKIALSSSASTEINLPFITADANGPKHLQRTLSRSEFEKMTDDLFERTKEPCRKALKDAGISADRIDEILLVGGSTRMPKVAHVIKDVFGKEGSKGVNPDEAVAIGAAIQGGILGGDVKDVLLLDVTPLSLGIETMGGVFTPLISRNTTIPTRKSQVFSTAADGQTAVSIHVLQGERGMANQNRTLGNFDLVGIPPAPRGVPQIEVTFDIDANGIVHVSAKDLGTGKEQHIRIESSSGLSESEIDRMVKEAEANAESDKREREKIEARNVADSLIYQTEKTLKEAGDGVNAADRARIDEAIAELKTVLSGDDVASIKAKTEILQQASYKIAEEMYKRQAAAGAAAGKKSDAPSGNEAEGGDVDYEVVKDEDSK

SEQ ID NO: 76441 - protein, 108 aa, Treponema pallidum
MDNINIAKDVRPGCVLLTVTGAVSSYTYGEFESRVHGALKENHVVLDLSGVTAMSSSGLGVLISAYDEGLKYQRRLCILNPSESVRRAIELTGFSEMFTVIKSLDELD

SEQ ID NO: 76442 - protein, 228 aa, Treponema pallidum
MFFSLYERRQSLLHRAPPVAKVASFALLLLCCNAQSWCMHASLTLVLLALTLIVTRSLKCVAAHIRVVSIYLAFFFSLKILHTFFSTGVVSATQINQHIHAGYHIGIRLFLLLCASSLFYACTSRLELFSLCLRMGKVLHVRSTAYTTPCAVYVMMLVLYFGHDIFREWTELRFVWRARTRANTSFYNWVDATLHFSKTLLTRLLERAQHPSLRRADFKVSDNILSSE

SEQ ID NO: 76443 - protein, 56 aa, Treponema pallidum
MAKRTAVELIALQCTGCKRRNYTTSRNRRNVQEKLELRKYCPFERRRVLHREAKIK

SEQ ID NO: 76444 - protein, 185 aa, Treponema pallidum
MAKEWYILHTFSGREARVERAVRMLVEHARIPTNVIFDIKIPEELLTEVKDGKKRVVRRKFFPGYLLVEMDLPEVDWRIVCNEVRRIPGVSGFLGSSGNAKPQAVSADEARRILQKAGEIKGDRTPRIAQTFLVGQQVRIVEGPFATFSGEVEEVMSERNKVRVAVTIFGRATPVELELVQVEAL

SEQ ID NO: 76445 - protein, 146 aa, Treponema pallidum
MAAKKKVVTQIKLQCPAGKATPAPPVGPALGPHGVSAPQFVQQFNDRTKSMEPGLVVPVVVTVYSDKSFSFVLKTPPAAVLIRKACGIEKGSTNSVKQKVARLSLAQLTEIAQVKLPDMSALTLDAAKRIIAGTARSMGVEVERSL

SEQ ID NO: 76446 - protein, 226 aa, Treponema pallidum
MKRGKKYRAAVARYDRAERFSLDRAVGLLKEVRYASFDETVEVHVSLRLKKNQTVRDTVVLPHRFRAEVRVLVFCKEDRVSEALAAGAAYAGGAEYLEKVKGGWFDFDVVVASPDMMKDVGRLGMVLGRRGLMPNPRTGTVSADLGAAVCELKKGRVEFRADKTGVVHLAVGKTTMDSAQIVENVDVFLSEMDRKKPVDVKAGFVRSISLSSSMGPGIWVVHKSEE

SEQ ID NO: 76447 - protein, 180 aa, Treponema pallidum
MAVRARRLQPAKVAAVESLTRDLGEASSYIFTEYRGLTVEQLTALRRALREFSCVYRVVRNNFANIAFTSLNMTVGEYLVGPTAIALVDTEHANGVARVLFDFAKEVPALVVKGAILDGEVFDASKVEAYSKLPGKKELVSMFLSALNATTVKFVRVLQAVMDKRDEGVEVSVVSGGDSS

SEQ ID NO: 76448 - protein, 129 aa, Treponema pallidum
MAALSNEQIIEAIRGKTILELSELIKAVEEEFGVTAAVPVAPVAEGGGAGSVAAEEQTEFTVVLKGLAEPGKKIAVIKEVRNVISGLGLKEAKDLVEGAPKTLKENVSKEEAAKIKESMTAAGALIEIS

SEQ ID NO: 76449 - protein, 1178 aa, Treponema pallidum
MSARVCKTHRVYVGRDVRNFMDIPDLIEIQLRSYDTFLHGARNTPSGADTLISGTREELGLEDVFKTTFPIESSTGDMTLEYQSYSLDEKNIKFSEAECKQKGLTYAIPLKALVDLRFNNTGEIRRKDIYMGDIPKMTERGTFIINGAERVVVSQIHRSPGVVFSHEKDKEGREVFSSRIIPYRGSWLEFEIDQKKDLIYAKLDKKRRILGTVFLRALHYETREQIIEAFYAIEKTPVCQDRAEYELLTGKILARSVTVENEQGETRVLYKAGEKIHPHVIDDLLQNGICEVYIINLEAEGSLRSAVVINCLEREEMKFSKSGAQDELSREEALCIVYSALRPSDPMTMDAAEKDLQTMFFSPRRYDLGRVGRYKLNKKFRSDSPTTECTLTLDDIVNTMKFLIRMYSGDAQEDDIDHLGNRRIRSVGELMTNTLKTAFLRMERIAKERMSSKETETIKPQDLISIKPIMAAIKEFFGASQLSQFMDQVNPLAELTHKRRLNALGPGGLSRERAGFEVRDVHYTHYGRMCPIETPEGPNIGLIVSMANYARVNGYGFLEVPYVRVRDGVVTKEIEYLDAMDEDRYYIGQDSTAVGPDGVIRVDHVSCRHRGDYSTRSPKDIQYMDVSPKQIISVSASLIPFLEHDDANRALMGSNMQRQGVPLIFPEPPRVGTGMEEKCAYDSGVLVKAKQDGTVAYVSSEKIVVCSAAASGEEQEVVYPLLKYQRTNQDTCYHQRPIVHVGDRVQVGDALADGPATYRGELALGRNILVGFVPWNGYNYEDAILISHRVVKEDMFTSVHIKEFSTEVRETKLGSERMTNDIPNKSEKNLDNLDAEGIIRIGSKVRAGDVLIGKITPKSESETTPEFRLLNSIFGEKAKEVRDSSLRVPHGVEGTVIDVQRLRRSEGDDLNPGVSEVVKVLIATKRKLREGDKMAGRHGNKGIVARILPEEDMPYLDDGTPLDVCLNPLGVPSRMNIGQILESELGLAGLRLDEWYESPVFQSPSNEQIGEKLMQAGFPTNSKVMLRDGRTGDYFQNPVFVGVIYFMKLAHLVDDKMHARSTGPYSLVTQQPLGGKAQFGGQRLGEMEVWALEAYGAANTLQELLTIKSDDMHGRSKIYEAIVKGEASSPTGIPESFNVLVQELRGLALDFTIYDAKGKQIPLTERDEEMTNKIGSKF

SEQ ID NO: 76450 - protein, 1416 aa, Treponema pallidum
MKDIRDFDSLQIKLASPDTIRAWSYGEVKKPETINYRTLRPEREGLFCERIFGTTKEWECFCGKFKSIRYRGVICDRCGVEVTHFKVRRERMGHIELATPVSHIWYYRCVPSRMGLLLDLQVIALRSVLYYEKYIVIEPGDTDLKKNQLLTETEYNDAQERYGGGFTAGMGAEAIRTLLQNLDLDALVAQLREKMMEKGAKSDKRLLRRIEIVENFRVSGNKPEWMILSVIPVIPPDLRPMVQLDGGRFATSDLNDLYRRVIHRNSRLIRLMELKAPDIIIRNEKRMLQEAVDALFDNSKRKPAIKGASNRPLKSISDMLKGKQGRFRQNLLGKRVDYSGRSVIVVGPELKLWQCGLPTKMALELFKPFIMKKLVEKEIVSNIKKAKMLVEQESPKVFSVLDEVVKEHPVMLNRAPTLHRLGIQAFEPVLVEGKAIRLHPLVCKPFNADFDGDQMAVHVPLTQAAQMECWTLMLSNRNLLDPANGRTIVYPSQDMVLGLYYLTKERSLPEGARPRRFSSVEEVMMAAEKGVIGWQDQIQVRYHKCDGQLVVTTAGRLVLNEEVPAEIPFVNETLDDKRIRKLIERVFKRQDSWLAVQMLDALKTIGYTYATFFGATLSMDDIIVPEQKVQMLEKANKEVLAIASQYRGGHITQEERYNRVVEVWSKTSEELTSLMMETLERDKDGFNTIYMMATSGARGSRNQIRQLAGMRGLMAKPSGDIIELPIRSNFKEGLNVIEFFISTNGARKGLADTALKTADAGYLTRRLVDIAQDVVVNEEDCGTINGIEYRAVKSGDEIIESLAERIVGKYTLERVEHPITHELLLDVNEYIDDERAEKVEEAGVESVKLRTVLTCESKRGVCVCCYGRNLARNKIVEIGEAVGIVAAQSIGQPGTQLTMRTFHVGGTASSTTEENRITFKYPILVKSIEGVHVKMEDGSQLFTRRGTLFFHKTLAEYQLQEGDSVQVRDRARVLKDEVLYHTTDGQTVYASVSGFARIIDRTVYLVGPEQKTEIRNGSNVVIKADEYVPPGKTVATFDPFTEPILAEQDGFVRYEDIILGSTLIEEVNTETGMVERRITTLKTGIQLQPRVFISDESGNALGSYYLPEEARLMVEEGAQVKAGTVIVKLAKAIQKTSDITGGLPRVSELFEARRPKNAAVLAQISGVVSFKGLFKGKRIVVVRDHYGKEYKHLVSMSRQLLVRDGDTVEAGERLCDGCFDPHDILAILGENALQNYLMNEIRDVYRVQGVSINDQHIGLVVRQMLRKTEVVSVGDTRFIYGQQVDKYRFHEENRRVEAEGGQPAVARPMFQGITKAALNIDSFISAASFQETNKVLTNAAIAGSVDDLCGLKENVIIGHLIPAGTGMRRYRQVKLFDKNKRDLDVQMEEVIRRRKLEEEALAQAVAGMEGEPEGEA

SEQ ID NO: 76451 - protein, 124 aa, Treponema pallidum
MPTINQLTRIGRKAVFSRTKSPALQACPQKRGVCTRVMTVTPKKPNSALRKVARVRLSSGVEVTAYIPGIGHNLQEHSIVLIRGGRVKDLPGVRYHIIRGAKDTLGVVDRKRGRSKYGAKRPRA

SEQ ID NO: 76452 - protein, 156 aa, Treponema pallidum
MGRKRRVSRRVPPPDARYNSVVLAKFICRMMLAGKKATAVGIMYDCLERIQQRTGEEPLPVFTKALENVKPAVEVKSRRVGGSTYQVPMEIRETRREALGMRWIIGAARRRSGRGMSERLAAEILDAYHSTGTAFKRKEDTHRMAEANKAFSHYRW

SEQ ID NO: 76453 - protein, 357 aa, Treponema pallidum
MHWYFDRVSRARGIMKFLRSCLIGGVFFFALCLSADEAFVSAMKLARTLNVSVSWNPLSQTILFSKGERRVQCRVGQVLALLDGSEVLMIDPPVVKDAVVYVSGGFAERLRKVFGYSSHQPEHRVGAVLIDPGHGGKDWGTKGSYREQGKTVVVKEKDIALRASQNIYDLLTARYPDRKIIMTRKGDSYLTLEERVAMANGVKLGKYEAILYVSVHANFSWNTKASGFEVWYLPPEYRRSILDKNAASKEVLPILNSMLEEEFTMESIMIARSIADGMQASVGAQSKNRGVKEEAWFVVRNAKMPSVLVELGFVSNPVEARLLNDADYLKRCAQGIYNGLVSFITYFEGSGGFTGPL

SEQ ID NO: 76454 - protein, 105 aa, Treponema pallidum
MKRVRRTRSFVVDALCDEVDLSRRHVARVVDSFVSVVTAALERGETVELRDFGVFESRVRKASVGKSIKTGEVVSIPSHCVVVFRPSKRLKSAVRGYRSGEVGAD

SEQ ID NO: 76455 - protein, 546 aa, Treponema pallidum
MRIEEWCRSRLGEFLLFVLAVSLFALSHPNPLLPRGCALLAYGALAPLFLLVRWASGFAVVFWGGAYGAFSYGAFSYWLFVFHPVALCVVAGFSALFLAALCLALKAGGAFWQRRALLVQCLVWLGYEYAKTLGFLGFPYGVMGYSQWRVLPLIQVASVFGVWVVSALVVFPSAWLASVLGQWVEESERNARAFLSAAYSHWVSALVWVGLCGFCVCAAKAGWWPDCTAHTRAKVALVQPNGDPRRGGIESYRADFSTLTYLSDWALERYPDVDLVVWPETAFVPRIDWHYRYRHEQQSFQLVCDLLDYVNAKNCPFIIGSDDAYKKRTKEGNWERVDYNAALLFIPGVNVLPPSPQRYHKIKLVPFTEYFPYKRVFPWFYNFLEKQDARFWAQGSEFVVFEARGLKFSVPICFEDAFGYITREFCARGASLLVNISNDSWAKSLSCQYQHLSMAVFRAIENRRALVRASTSGQTVAIAPDGRILDELQPFAPGVLVADVPIVTCACGGYRYWGDALGVFFCVASLFILIAGGVRHMLRCRRGGWR

SEQ ID NO: 76456 - protein, 519 aa, Treponema pallidum
MKVSVGTVVGQGELGLEEGIVGNQIVSEDSAADVGECDAYGGRKKLVIRSRSRRRVVTPKALEVEKRPRRALRFKQNFCPEDAETSESSADVKGRARLLIDDLTEMGMHALRDFAVQRGISQEDVVVMKKSDIIFHVLKNHTENGGVIFASGSLEILPDGYGFLRSPQNSYLPGSDDIYVSPSQIRLFNLKTGDTIYGQIRSPKEGERFFAMLRVETVNFEEVAKVQDRVPFDSLTPLYPREKLNLETRTEDISTRVMNLFCPIGKGQRALIVAPPRTGKTILMQKIANAITQNHPEVYLIVLLIDERPEEVTDMERTVDAEVISSTFDEQATRHVQIAEIVLERAKRLVEHRKDVVILLDSITRLARAYNQTMPTSGKVLSGGVDSNALHKPKRFFGAARNVEEGGSLTIIATALIETGSRMDEVIFEEFKGTGNMEINLDRRLSDRRLFPAVSIKKSGTRKEELLLTEEEMQRIWVLRKVINPMDDAEIVELLIDKMRKTKNNEAFLRSMNTGAFSS

SEQ ID NO: 76457 - protein, 67 aa, Treponema pallidum
MKKGLHPRYEETKVVCACGNVIVTASTVKDLRVEICSACHPFFTGKQKLVDSAGRIDRFNRRYKIRG

SEQ ID NO: 76458 - protein, 216 aa, Treponema pallidum
MRLSDFYTALRLALVLPFFALYHMSRWVVMYFPAANVGRVVSIASVLLFLFIACTDFLDGYYARKSGKYSSFGKVFDPFADVIANVTVMLCLVADNFMPVFLFLCILYREFGMMFLRMLACGEGHVVGAQRMGKLKTASYMGAVLFSLLLKALYAFELAGADWYERMRAVGRLVYVVPVVLALASFFSYLKTFFPILKRVCGRTRYPVCKTCREWD

SEQ ID NO: 76459 - protein, 218 aa, Treponema pallidum
MELNAYIDHTLLRPSASEAEVLRLCQEAQHYRFASVCVNPCHVALAAGAVRGTAVRVCSVIGFPFGTHVTEVKCAEAQRALDDGAQELDMVVRIDKVCAGEREVVEREIAQVAARCHARGAIVKVIVETALLDEMHIAFACSCVEAGHADFIKTSTGYASRGGTEGDIQCFKKYLKGETKIKASGGIRTRAQAQRFIELGCARIGTSNGVAIMEERAS

SEQ ID NO: 76460 - protein, 455 aa, Treponema pallidum
MIHTHTLSLSFMLFSFFFGAGNLILPPLLGKHAGTTLATALLGFATSAVLIPIAGLITIAHAGGIVPLSERVGKRFAHLYPAITLLVIGPALSIPRAGIVPFALAIAPLIHRANTTLLAQLIYTTCFFIVSYWLCMRPHTLSNTLGKVLTPALLVLVLLLFLASFTPTLGPYLPAQGAYATHIPFSQGFLDGYLTTDALASLMFGNMILTYLHRTRYTTAPFPPTPANTPADMRTVAWIAGVMLFFTYGVLAHLGALSARQLPHTVNGAHILASVSRHLFGKAGIALLGLIFTIACLTTCAGLLVCVSEYFHKRAPRVSYLCWIRLFTISSFALANTGLERILAYGTPLLMILYPISLVLIGISHLERLIRIPRAAYRLTVWSAGTLSTCAVGTPLVAHTRIGHVLNTLIHTLPLAQEQLCWLIPSAAVLILSTAHARLREKTCTPRGTLPLTDN

SEQ ID NO: 76461 - protein, 478 aa, Treponema pallidum
MRVFPVCPLLREVSERFIRAGFCIYVVGGAVRDFLLNRSAHDWDLATDAPPERVRMLFRRTVPTGIEHGTVTILFRGHSIECTTFRVESDYSDRRHPDSVCFAARIEDDLARRDFTVNAFAAALPSGEIIDVCGGYADLRNGLICSVGDAHARFSEDALRPLRAVRFAAQLSFSIEARTREAIIALRAHTARISRERVRDELSKMLCTPRPSIALRLMEETGLLHTLFPALAQVCGRNEGEEKETQDSLQVSPQQRRDARTFAACAFAACDRVPAELAVRLAALLFPLAHYRTLPASGTGAALFICPPALAEARELLRGLKYPNYLTAQVCHLVAHARFTPHECWSEGTLRRFVVTVGTTQLESLCVLRRAYLADDDYRISAQPGVSCENAREGKKMQEQFEIFVTRVRRVAAQLPVHGIRDLAVNGRDLIAQGIPPGPTIGHILNALFDMVLMQPSRNTRPQLLEHAQEIVRTMAQN

SEQ ID NO: 76462 - protein, 253 aa, Treponema pallidum
MGKTLVFVNQKGGVGKTTSAINLGAYLALAGKKTLLVDFDPQGNMSSGLGLARGLTVYDLLAGKAHINSVLRTTPVHNLFAIPASIDLSGATVELVDEQDRELYLKKILAEVKDTYDFILIDCPPSLGILTLNGLAAANEVFIPLQCEYFALEGLTLLLQTVKRVQSGLNTALSIGGIFFTMYDTRTKLAQEVVKQVTTYFGDKVFNTIIPRNVKLSEAPSHGLPISSYDAQCAGARSYEKLAREIVARDGQR

SEQ ID NO: 76463 - protein, 294 aa, Treponema pallidum
MVLSHSVRRAQRVDIMKQLLITAEPDSGGYVQLSGKDFHYMVRVRRARVGDTFTLRTQAGAQYSAVVSALDIHTRSLILHCTPMPPVDEKTQVTLVLLQWMPRARVFDAIVRHATELGTARIIPIRGERSLIRDEKDTQHARLQRIVREARQQSGSAVNTRVDTLHSLLGALHMLEQEFPYPSAVRIYCSEKHVGGSFHELLWTGRSTHCTAHRTPTEPNAPHNTPDVRAQAVILAVGAEGGFSDTEERTLHDAHFAPLHFRTNVLRVETAALYALAGAHLLLSEAALWNKRSW

SEQ ID NO: 76464 - protein, 863 aa, Treponema pallidum
MHGGGERERSFVHPRTRCVAVRARTVLQCRPMGTVIIALDGPAGSGKSSVCRLLASRLGAQCLNTGSFYRAFTLAALRRVSELAVQACSPSPDPDAAVGCAAVPHATNLDTSYAPLTAQKKVALFDEAYWVSFARTVALSYRAGVMYVGEENVESLLRSDEVESAVSYFAAMPAIRAIMTGKIRSAVCGARVVCEGRDLTTVVFVDADLKCYLDASIEARVARRWAQGTSRLSKQELEQRMRARDAHDRARTVGGLRCAPDALYVDTSCLTIEEVCERIAREAHRRALWGGERSVENQEGKGTPLVPRQLQERYSFEAPEPGSVRMGTVVQVNAGTVFVDIGGKSEGRVPVEEFEAPPKAGDGVRVYVERVTPYGPELSKTKADRLGLKVKLRDAERDGTPVEGRIVRLTEKKSGFEVDLGAGMMAFLPISQSDCQKVDAPESLIGLTSKFYIERISQSKQHRGNDNIVINRRRYLEERARQAREEFFNSVHIEDSVSGVVKSFTSFGAFIDLGGFDGLLHVNDMSWGHVARPREFVKKGQTIELKVIRLDQAEKRINLSLKHFQPDPWLEFENKFGVNDVVKGRVTKIADFGAFIELAEGIEGLAHISEFSWVKKTSKPSDMVKIGDEVECMILGYDIQAGRVSLGLKQVTANPWEEIEARYPVGARFTRRIVKVTNAGAFIEMEEGIDGFLHVDDLSWVKRTRPADHELEVGKEIECMVIECDPQARRIRLGVKQLSDNPWQVFANAYGVGSTVEGEVSSVTDFGIFVRVPGGVEGLVRKQHLVENRDGDPGEALRKYAVGDRVKAVIVDMNVKDRKVAFSVRDYQRKVQRDELSRYMSAPRGEDEGSFTLGDLMRQTSGK

SEQ ID NO: 76465 - protein, 277 aa, Treponema pallidum
MSGAQVRLVVTDMDGTFLDSENNIPPENKQAVKCLHEKNIPFVIATGRMLPMVQEYVRQLQLVGPVVGYNGGMIREIKTGKTIFQKCFAAEAFARVLEYGMAHRLDYLVYTSDSVYAPDYSVRIRAFHEYNRLARRGGSALIPIFPIEALSGDRQRQVMKILVQNFSPSDLETAAEFIGSLHGVHCEHSMPHLIDVMPEGVDKGNALHILCQYYGISLEQVCVFGDQRNDIVMFKAAGVSFCMRNGHEEAKKHATYIAESNDDAGFAQALKRYGVVE

SEQ ID NO: 76466 - protein, 293 aa, Treponema pallidum
MVRSARSEYKCRLCARCDGYGCRGQLPGMGGVFNSANFIANCLAWKKYVPQRHELPVVRLAPMTGAVENVGYPDEVSFYYRLIEAVSGTGVLLSVGDGCPDIKLQSGIAALRSFKKKAAVFIKPYVNKKIFERIEWGRDVAEFVGVDIDAYHIVTMRDKVQLEKKTPTHLRAVRRFAKLPIVVKGIFAPRDVELVRELKPDVAIVSNHGGRVETARGSTADFLFEYGGELARCAGEVWVDGGIRSYAHLCAARELGAQQVLIGRPFITALLKGGKGGVQLLVRNMTDRSVRCV

SEQ ID NO: 76467 - protein, 421 aa, Treponema pallidum
MRCSGFTDLAIVACPGGEHFADETIKHLTRVCERKFHQRMDRLTDRYGLDSGSVIRDANFYRDLFSTELCAHDDVRRFNPPHFKVDAQFICFLNGELKTQINECIRGKDVFIFQDVENHQPVLVNNGKSKKIFSVNDHVMMLIVTIDAVRHAGAGRVTLVLPTYPYSRQHKKCGREGLTAGLLGSVYEYLGVSHIVTLDLHSREIENAFHRTRLENLHASYQIIRELAKIENLSDPDIPFVVVAPDSGAVERNKFYSSGLKKPLAMIYKVRDYSVVAQNAKQSNIVEINLLGDVEGKTAFIADDMLGSGGTMLKAMEFLKSRGAKQVIAAVSLPFFTGNALELFDEAYEKRYFSRIIGTNAVFHTQLSHKQWYTETDVSGLFARVIARIHHNQSLSSLLDDRSIIERLLHARLSVAGTPRA

SEQ ID NO: 76468 - protein, 414 aa, Treponema pallidum
MGSGIFVADIGTSSLKAAIISQDGKVLQYQRVFFPQPVKAQDWVRSFFTVFERLRAVHHVIAITISGNGPSVVAVHKKSHAEDQLILWNQAGASDPRCGVSLFLPKVLLLLQRLHFCARDVQFFLSSHEYLIYRLTGCAVTVLPERRYMPTYWTSESLRACALPETLFAPFVAPGSIVASYRGIPVVCGAPDFAAALIGTNTLHAGSGCDRAGSSEGLNVCVRLPPAIRSADARVRVLPSLRADFWNVSFLIADSGSRFASYMRRTHAQGFGERMGQIMALPFQLHDAYPPTVVGEGRQLVEDLAFEVCAGLEYLESVTQLQPVYTVSGGQAKDSRWLQLKADVSGRCFVLPEIHDAELTGNAALACVALDFDADMQTAAQRLCRLKREFIPNRARHEQYAQKRLLRAAREAQG

SEQ ID NO: 76469 - protein, 648 aa, Treponema pallidum
MACAKRATGAALRQNAGAGCLRSGKGFSMHETSYKPIHRLSPDTAKKIAAGEVIERPASVVRELLENALDAGATKIHLEINAGGCALIRVSDNGHGMSPQDLLLCAEAHTTSKISSADDLLQLRTLGFRGEALASIAAVSRLHLTSTRSGPLAWHYQPKAAGTAAHVPPVPQGTEAGVLEPASLERGTVVRVEQLFENFPARKRFLGRQSAETTLCRSALIDVSLAHHPVEFRFTVDGTHKLTLLSQQTRKDRCLETQMLKGDPALFHTIEGGDCSFHFHLVLSEPAICRRERRGIFTFVNGRRIFDYGLVQALVLGSEGYFPNGTFPVACLFLTVNSERIDFNIHPAKKEVHLQDYAHIRHTLSRSVAHFYRQCTIAHYVRAEPAHAPATQGNAPTHSSPPCTGVREEPAAPCAHTPRYESLFPLPVQHAHLLPPSPPHISCEHARDCTHPAPAAEGDAPVHNHTHTGAFKVLGQVAGTFIAVERNNALYLIDQHAAHERIIFDTLQRNLGTAQILLIPYHIHPRSDEEARIMHRACTELSPAGFRFHEEPDGSWHVTAVPLHWRGSEEQLAHDILYSGKNAHDILRHVLATCACRSACKDGTILDDATLHSLVEQAFALPQSRCPHGRPIWIVIGRDELFKRIKRT

SEQ ID NO: 76470 - protein, 577 aa, Treponema pallidum
MDPAFIFITGGVVSSLGKGIAAGAIGLLLKSRGISVVNQKFDPYLNGDPGTMNPYQHGEVFVTQDGGETDLDLGHYERFTDVPSSRFNSTTAGSVYRAILDRERAGGYGGATVQVIPHVTDEIQARIRAAAATTGARVVITEIGGTVGDIESLPFIEAIRQIRRVLGKERCLFIHLGLVPYLPSCGEMKTKPLQHSVKELLGLGVQPDVILCRSERHITDAVREKLSLFCNVERRAIVENVTARSIYEVPLLLEAEGLGALLCERLRLFDTCCGGQVARNLGAGGAQSAVLGAGGTVRTDGGLHPAAGQGAEPDLTAWRAMVRALYYPRRELTVALVGKYVSLADAYLSVSEALTAAGICHRARVDMRWIDAEEICSVQDAGHALADADALVIPGGFGVRGIEGMICAVSHARVQNLPYLGICLGMQIAVIEFARNVLLLASAHSREFAVDTPHPVVDLLPGCVDTPTGGSLRLGQYRCLLAEGSRARALYGRGEVWERHRHRYGLNAAYRARFEASALRPVGVDSDCGAVEVVEHGEHPWFFGVQFHPEFCSRPNRAHPLFRALVAAGLERKDSRS

SEQ ID NO: 76471 - protein, 204 aa, Treponema pallidum
MAVKRARGKIVRRLGINIFGNPKYTRLLGKKPAPPGKEHGVKQRAKVSVYGEQLKEKQKFRFAYGMSERQFRNLFAQAHRMKGVTGNNMLSLMERRLDNTVFRMGFAISRVQARQMVSHRYFLINGKTANIPSMRISAHDVITTKNRKGIHSIIRHNLTLSQGQRGSWLNVDEEQLSATVSELPRAQDIHPVGNIQHIVEYYSR

SEQ ID NO: 76472 - protein, 342 aa, Treponema pallidum
MDDGPLRVVVLTSFVILVVVCAVALCTFFVFLKSPDQVMTPHIVGKDFVSAAIEMQAKELYPRVQLRFSTREKPGVVLEQNPPAGAIVKAGRYVDLVVSQQAVTTHVEDYRGLQVEEAVARIAAAEVERRISVKTPHLYRFSTGAAGTILEQDPAPGAVLSADVELRFVVSKGSEREQTTVPLLVGYSLPELYRVMAQTALTLQFTVSPPSPSGERKDGEARGRTRANAQDYARVSAQDHDPGSRVEAFRAMQVQVLFPERGEAHEIYGILALDLPRYPYPMSCVLDVQYPGGVRTALAMFQHPGGRFTIPYGLPAGATLFLTVGGKELFSGEVGALPHAGS

SEQ ID NO: 76473 - protein, 900 aa, Treponema pallidum
MRSLASDTPLMRQYHAIRAQHPDAVLFFRLGDFYEMFDSDALHVSTLLGLTLTKRNGTPMCGVPVHTARTHIARLLKHGKKVALCEQVSHPVPGELTQRKVIEIISPGTAVEDDFLSQGFSQYLATVCASDATVAFSYLEVSTGAFFITSFPRAEAADALQKEFGRVQPSEVLLSASVLRSLPELAAILSLYPRLVRTTGADALFNPEHTKNRLHHCFRTRNLDCLTLLPHSPDLAAAGALIAYLEETTRHPLSHVSAITRYHIHDFVEIDDATRKNLEILQNLHDSTHAHSLFETLNYTHTAMGTRLLRYWLHHPLRSQEEIQKRLSAVVFFHHRPHILKTLRATLSCVRDVERLVARVALEKAHGRDLLALKESLRAILTFRSLERESPFPPDLLPSEGDTPVLQELYGLLEQSIKEDCPVTLSDGNLIKRGFSASLDELHRVRDNANEILKQYLAEERERTGIGTLKMKYNRMLGHFLEVSKGHLSAVPAHFIRRRSLSNADRFTTEQLSELEAKLARAREGLVSFEQELFADIRRTVCSHTQLLRTNAARVAQLDVLQSFAHAALQHGWSQPVFIKDGALRITGGRHPVVELHLPSGEFVPNDLTLSSSEHAVLPRFALITGPNMAGKSTFLRQTALICLIAQVGSFVPAEKAELTPVDRIFCRVGAADNLARGESTFLVEMSETAHILRAATRDSLVIMDEVGRGTATEDGLSIAQAVSEYLLHHVRAKTLFATHYHELSRLAHPQLEHLKLDVLETDNTIVFLKKVTPGSCGSSYGIYVARLAGLPESVLARACELLKQLQQRAGSAPRASAAHEADAVAQTEAVHAHKAASKPCAQRVSADLFTQEELIGAEIASLNPDAITPLEALTLIARWKRSLRGSATQQSSAMTKRKG

SEQ ID NO: 76474 - protein, 574 aa, Treponema pallidum
MNNSALRAYLSTRAPDQIHSAFVAYLANLDLVAHQFPQIASDIVQELIDQRSYVKLIASENYSSLAVQAAMANLLTDKYAEGFPHHRYYGGCQNVDSIESAAAAEACALFGAEHAYVQPHSGADANLVAFWAILSRQIEMPTLSSLGVTAATHLSEEQWEVLRQKMGNQKLMGLDYFSGGHLTHGYRQNVSGRMFRVVSYAVDRDTGLLDYAAIEAQAKRERPLILLAGYSAYPRSINFRIFREIADKVGAVLMADMAHFAGLVAGGVFTGDEDPVRWSHIVTSTTHKTLRGPRGAFILCKKEFAEAVDKGCPLVLGGPLPHVMAAKAVAFREARNAAFKTYAHAVRDNARALADACIQQGMQLQTGGTDNHLLLLDVRPFGLTGRQAERALIDCGVTLNRNSLPFDPNGAWLTSGLRIGTPAVTSLGMGPEEMKRIARLIARVLGAATPVRTKTGALSKSAAEVPGEVRSSVCSEVRELLARFTLYPELDEPFLRAHFTRRPAGQNTCRRRDLNPYGVTPTDFESVVSASFTTSARAQPITRGTKGTAVHVVFLREAPCLPLREPLFFSHEEF

SEQ ID NO: 76475 - protein, 488 aa, Treponema pallidum
MGADIGFIGLAVMGENLVLNIERNGFSVAVFNRTTTVVDRFLAGRAHGKRITGAHSIAELVSLLARPRKIMLMVKAGSAVDAVIDQILPLLEKGDLVIDGGNSHYQDTIRRMHALEAAGIHFIGTGVSGGEEGALRGPSLMPGGSAQAWPLVSPIFCAIAAKADDGTPCCDWVGSDGAGHYVKMIHNGIEYGDMQIIAEGYWFMKHALGMSYEHMHHTFTRWNTGRLHSYLIEITAAILAHQDTDGTPLLEKILDAAGQKGTGRWTCVAALEEGSPLTLITESVMARSLSAQKQARCKAHRVFGSPVKVSKAETLSAQQREELVSALEDALYCAKIVSYAQGFELLSHTAKRRGWTLDFSRIASLWRGGCIIRSGFLSKISAAFAQQHDLENLVLAPFFAEELKRACPGWRTIVAESVRQALPVPALSAALAWFDGFTGAALPANLLQAQRDYFGAHTYERTDAPRGEFFHTNWTGTGGDTIAGTYSI

SEQ ID NO: 76476 - protein, 405 aa, Treponema pallidum
MPDIGELLKTTRERKHLSLEQAAHETSIARRYLEALENDEYDVFPGEPYILGFLRNYCEYLQLDTEQCIARYKHLKIQEMSLPTETLLPSKRWGSFPLLKGVACVLFLGGVLGVYYARHRALGFLSRIVFFGRAQRTPRELSPPDATGAVRETVSLSSAQHEERARRTRSSASRYTLAEEKFEHTVFPGDVLVISSGGNAYELTVSRTTPHLYLDTPIGTQVISLGQRLVMDLNTDVQPDVEISVEDIEAHQADGGARVRVFTGSLVQTLRDRSAQSFVPTSGVNVSGQTGVAAGARYQVLFEGGVAYPVTMNATFRSYCLFRYEADRTRREERYYQKGEQLTVQANNGIRVWASNGNVVQLQIVAGGKTVDVGLSRPGEVLVKDIKWIKDEDAGRFKFVVMEVD

SEQ ID NO: 76477 - protein, 285 aa, Treponema pallidum
MCCPNYNSARALAQFLTERGLRMHKKWGQNFLLDPVLRTQLVKILAPERGERVWEIGAGIGAMTALLVQNSDFLTVFEIDRGFVQTLRKLFDAHVRVIEGDVLQQWHAAAAQEQPACVLGNLPYNIAARFIGNTIESGYIFKRMVVTVQKEIGLRMTALPAQKWYSYFSVLCQWQYEVRVIRNVAPVCFWPRPHVVSQALVLTKRNAVPSCVDPALFLHVTKTLFSARRKTVRNNLLTWQKRMPGGAAVCVEELCARAGIDARARAEQLSIYDFITLSDTLRALL

SEQ ID NO: 76478 - protein, 481 aa, Treponema pallidum
MKRGTLPKDVSGIKIHMIGIKGTGMSALAELLCARGARVSGSDVADVFYTDRILARLGVPVRTPFSCQNLADAPDVVIHSAAYVPEENDELAEAYRRGIPTLTYPEALGDISCARFSCGIAGVHGKTTTTAMIAQMVKELRLDASVLVGSAVSGNNDSCVVLNGDTFFIAETCEYRRHFLHFHPQKIVLTSVEHDHQDYYSSYEDILAAYFHYIDRLPQFGELFYCVDDQGVREVVQLAFFSRPDLVYVPYGERAWGDYGVSIHGVQDRKISFSLRGFAGEFYVALPGEHSVLNATGALALALSLVKKQYGEVTVEHLTALRKVLALFQGCRRRSEVLGEVRGILFMDDYGHHPTAIKKTLRGLKTFFPERRIVVDFMSHTYSRTAALLTEFAESFQDADVVILHEIYASAREVYQGEVNGEHLFELTKRKHRRVYYYEAVMQAVPFLQAELKEGDLFVTLGAGDNCKLGEVLFNYFKEEV

SEQ ID NO: 76479 - protein, 1140 aa, Treponema pallidum
MRGILHSWNELQHALRSLRAARFPYRVEGCTGGLRSYFFGEYVRTCCAHIVLVVPTEQDVAAVCTDLAHAAVPTRVLPWWGSLPYRPVSPNAHVFSHRVEALCALAQRDATAPCAFVFTQRALLTPVPPLDYVRTLKRSFRVGEHIEIHTLAAQLMQWGYARVDHVSACAEFSLRGEILDIAAAAQAADNTQAYRIVCDFNTIERIHILAVSTCAVLQEVSACTLYAAKEILWSEERIAFLHQNLQKLSECPAHCVPCIEELTHRKTYEGEEMFYPLCFERPTCVLEYFRHSPSPPSVFYLDYERQHNGARALQDECRNLYHKMQLAHEHVPARWYPQPEHIVLDFSAVCALHLHTVYFTHFFPQLPACESICLASDPARSFFGNIPYFKEELLRLSKDGWHVFVFAESEQQALRIRALVKGCDVTVLPCALSAGFSIPALKILIVQEGEIFGRRRKTPQSVQRARSTPIDTFVELNPGDYVVHAQYGIGLFKGIERIKTAQSERDYVNLLYAQEETILIPIEQAHLVQRYIGNEGNKPHLDSLGSKSWETRKARVKKSVENIAQKLVELYSLRKTTRGHAFPKDDEWQYAFEAAFPYEETDDQRICIEEVKQDMQEAVPMDRLVCGDVGYGKTEIAMRAAFKAVMGGKQVVFLTPTTLLVEQHFRTICNRFKHFPVRIEKLSRFVPKSEQKDILAKLAHGDIDLIVGTHRLIQKDVSFKDLGLMILDEEQRFGVQDKEKLKQMKTNVDCLSLSATPIPRTLHMGMLKIRDMSLLTTPPEGRLPIETVIQQFDPNLVATAIRKELDREGQIFYLHNRIENLESVKCMLQKLVPELSICVAHSLMGSEELEDIFERFYQKTFQLLLSTTIIENGIDVPNANTIIIDRADMYGVSQLYQLRGRVGRSDKKAYAYLLYYHDVALSDLAIKRLQVISDFTDLGAGFKVALKDMEIRGVGNLLGKEQSGDIYSVGFDLYVQLLEEAIERLQHAPNEQRIETVIDLNYRGFIPHTYIAADEIKMELYKKIAAAHTHEELERIRTETITRFGPIPEEAAGLFTVAEIKVRCEKLAILSLKETHESLLIEFDKVCDTAFKKILRLVQTSNDRVRLDAKQPNMLILTSDAIEIKEKGIFICEILKRLES

SEQ ID NO: 76480 - protein, 363 aa, Treponema pallidum
MGLIFFRYDRCYMLSVLSYLHVYFGPFRLLQSYAVLMGIALYAGFFFTYGVLPSAYRFLPQDRGRAFAPCAQEAAGKPTGAGVIFVSVFVLLVYLLMRPSFVHALILLLTWGVMLTGYLDDCAQVCWGEYRKGALDFLFAVLTAALLGHFYFHDQVFWWFPFFSDPVFVSPFLFFAGSVVILWMSINATNCTDGVDGLSGALVLMALLSMGTIFYFLLGNVRAAQYLLVPFVVDGAQWALMSFALAGALMGYVWRNAHPSTVLMGDAGSRALGFFIGVLVLISGNPFLLLMTSGVILVNGGTGLLKVVLLRFFHVRILSRVRFPLHDHMRENWHWSTAQVLLRFMILQGLLTIGLLGVLFKLR

SEQ ID NO: 76481 - protein, 428 aa, Treponema pallidum [sequence omitted]

SEQ ID NO: 76482 - protein, 208 aa, Treponema pallidum [sequence omitted]

SEQ ID NO: 76483 - protein, 78 aa, Treponema pallidum
MARRCGLCGKGTISGCAVSKSMHHCKRVWKPNLLAVRVVVDGSALNMRICARCLRSNPLMKKAQPRANAPLRAAAPKL

SEQ ID NO: 76484 - protein, 812 aa, Treponema pallidum
MPMSDYLDAGNEELLKDFFSEAEQQVEQLESNILVIEQDPTNRDAVDEIFRAAHTLKGGAATVEMHELSGFTHAVEDLLDGIRSEKVTVDGAVVDLLLTSLDVIKAMLESRAGGGPYAEDVSDLVARLRSYLPASGTVPGAARGLSVSSPNAAEAAKGTAVGEDGTEAPQVGRVPPLSLLSEYDRLELREIVPPEHSVYALTVRFDESNLMNTVGGIQVFTALKSCASVLKTVPDFDALYQDMFHEYVVYFVSTVQDSVCVSQVASIPDVTLSVSVAEVALADLCTPLSEHGELGVCADAGTGGVSEGSGAAVRSGGERVPNSLPKQVAGCAVPSAKDSSKATSSGYGSGSVLRVDAKRIDYLLNLVSETVIIKASLNQSALEFGEVYTLFQNANGAYKERLRKFFDRVPAYLEKVKNGQDADAVRKGMIAEAVGVFDIFSSFENGLKQSVTKFRSSAQNLGRISGELQEGVMKIRMVPISQIFSRYPRVVRDLSRDLRKEVRLVIEGEETELDKSVVEDLLDPIMHCVRNSLDHGIEAPEVRARSGKPAQGTLLLRASNEGNMIVIEVADDGRGIDVEAVKTKAVERGVLHPGKNLTEVEAFQLIFAPGFSTSRSVSNVSGRGVGLDVVKTHIERLNGTVSVFSEVQKGTRFVIKLPLTLAIIQGLLIRVGQEVYSIPIASVIESHRIKSEEINRIDNYEVFNVRNEVISLLRLDRLFGISCDDEVTGQYHYVVIVGAAEKKVGLMVDALIGEEDVVIKPLRDQFTSSPGIAGASILGDGSVSLIIDVGQLLELGLKREILARERREATVW

SEQ ID NO: 76485 - protein, 941 aa, Treponema pallidum
MLFLKTLEVFGFKSFADRVRVEFADGVTALLGPNGCGKSNVVDAIKWVLGEQSSRALRADRMEDVIFNGTESRRSLNVAEASLTVCDEAGILSLDVPEILIKRRLYRSGESEYFLNGNAVRLKEIRELFWDTGIGKVAYSVMEQGKIDQILSNKPEERRYLFEEAAGVTRFKVRGAEAARKLEKTAENLRHLEVILQEVEKSYESSKLQAAQTQRYRMLKEEIFARDRDLGLLRLRGFLENQARADGALQRNRARRDALQTQVEEAQQTLSARIGEINDMEKRVDALQKEIYGLAIEQKAKQNEASLHRKHLSELKESIGQIEMRKIGVESRVQNLEEEVAEQDAHVYQLGSALSSVEEHIESFARSLHVASEHVSENDQTLRDIQGQMQEISAACVELEASLRDVAEDIAAELDTRLSAAGYSARNRAEAERTLVAGVQRLRTFVEGRARIVSDFLVVDTHTEGELCRMLTTVVDAFNEAVKIVHCVESDIAEYARVSARFIDEFVAPQGIMTKKREFERQLEQHRAQLERHAARQRTLQEENKLLVGKIEACRKTLESLRVDQARLRAEAEAGQKQAAGTRGEVARQRAVIKELEGELFTEGERVAALEERLLEVEGEIGQLEQRGVLLTKSLENCEGEIRVRNAAVTSEEHALQEARVELAQVGRQLEQAHRELMQCETEIRNLREHFREQHTRDLSEFEDLIPGIEKTASDLRQERGELQARVKEIGAVNFMAVEEFQEVKERYEFLVAQVADLEKARADLQRVTDKIKAESAELFLATYRRIRKNFHEVFRRLFGGGRAEIRLSDPAAVLSCGIEILAQPPGKKLEHIGLLSGGEKAMTAVALLFATYMVKPAPFCLLDEIDAALDEHNVARFVGMLDEFSDVSQYIVITHNRRTVLGARTMLGVTMEEPGVSKVVSIALESASERPANGEAGGAI

SEQ ID NO: 76486 - protein, 516 aa, Treponema pallidum
MSVWVALALLGMCVSCTHVPPPRALIVSKEPPPALDSAPRPAIPEAVPLPSPVEEEIAGRLPPAPAAAPERVPESSQEREQKPESSKPQVVEPVSLASPVKPREAGSVPDVLPVPEVSSPHVAPPAPPAPTAPRPHRPSPPPVSPSASKPKQRAVPPSPPPASEPPREAEVQAEPEPAEDSPRAMVPEEPPEDEVPRVSRAVQLAVGQKLEVLYPGEGWVYVGEHTAQPGLRYHQRKLEESHSLFTFSAEREGDFVLAFSYFDVFRGDFVSDALAVKVVPKREGLARVVRAPEYRRTVSSPPDTVVSELSPAGTGTERRAEESGTSGSQRAAAHTGAPVRQDQTDTAVAEKAQHGTPRPDEKKDREPTVGGRDPVPSDAVAQGVSERYSPRKISPASQPSAPSAAPIEAHVPASAHKEGQEKRDHLAEARQFCAQGNARDALASLGDFFAQFPSHERMDEAWFLRGQAYEINGAQRNVRLALEAYKTILERFPHSPYWKKADERARFIKNFFIKIS

SEQ ID NO: 76487 - protein, 138 aa, Treponema pallidum
MSAQTQRLHPPFYDKRTQRVNSPFSLPAPKTQEKKYLCLLGTVDSVCAPLYDPPLAFTIPQAEVSHMNERNKLLARALYSCVPHVQGSDDYEDDFEDSDFQDGDFDDFEDEDGFDDDDDFEDDDFEYEDEDNDLDFDE

SEQ ID NO: 76488 - protein, 196 aa, Treponema pallidum
MDERRLKGKRRVQLGKYAAVRGRKEGRLPAVMYDHRGVSVPLELAQQDFDRLFRALTRSTVLSLELDGGEVFCVFVKDYQHNMVSDRVEHVDFYAVEESVPLRMRIRLQLCGSPEGVRYGARLEKGLSYIEVESLPRNLPDRVVLDISGLGAGDVRRVRDVPLPASVVVLSDPDAVIVALSSSASEAGSPAGARTG

SEQ ID NO: 76489 - protein, 477 aa, Treponema pallidum
MSESRQKLHPLLVHVARSFGHFLVPRKPSCLLVAVSGGADSLALLYAAHELAPDFGVCACAVTVDHSLRAQEGALDARFVRALCARFSPPLPCFVQQISAGAVHACAKIRGRGVQDAARALRYKVFDHVAARCGAQVVLTAHTRDDQYETLLMRLFQGAAASALQGIRAARGRYVRPLLKVSRTCVEDFLQTRGVRWREDASNTCRKYVRNRIRHELIPALDAVLAGWRSGLDKTFAGISAEHSFCVAALTRWREGCSHAWEPVPRALGTRLRMPRSDFLAAEFILRFFLLQEACVRLGVSHRVPRGALERCARFDGVRRIHVSGLQLERAGAYVLFSCIHASDTARETKKQDAGSPPSSEKQGVSAIYVARPGAYPCACGTLLVEVRPAGVFVCCAQDHVGVGPFSFPFYIRTHRTGDTISIRGGHKGIRKMFSEWHVPLSDRTVLPMIEQDGVLRALYGAALGYQNRYAERTPHE

SEQ ID NO: 76490 - protein, 916 aa, Treponema pallidum
MLVRTALRLIFGSQHERDLKNLLPLLNAVNAQESWVLPLQESEFKQKTAEFKARAAAGEALDAFLPQAFALAREAARRVLGERPYDVQILGSLVLHHGKIVEMKTGEGKTLMSVAAAYLNSLSGRGVHIVTVNDYLAERDARWMRPVYDYLGVSVGVILSSMGSQERRCAYACDITYGTNNELGFDYLRDNMQFLTEEKTQRDFYFAIIDEIDSILIDEARTPLIISGPAENDTQHYAEVDRLVGQLQEVERNPATGDYPNEVDGEEVRGDYIVDEKNRKVSFSGPGMLHIQDVLTHAGLIQGSLFDEENFKYIHYFTQALRAHLLYRADVDYVVKDGQVQIVDEFTGRILEGRRYSDGLHQAIEAKEHIRIAQRNRTMATITFQNFFRMYKKLSGMTGTADTEALELNKIYKLEVVVLPTNLPVARVDEHDVVYLSEEEKWSAICDEIKEAHTRGQPVLVGTISIEKSEKLSALLRTRGVKHEVLNAKNHAREALIIAEAGAKGSVTIATNMAGRGTDIKLGGNPEFRARQSATAIASKHGSSSVTVQEHMQACYEAEYTRWRADYEEVKQLGGLYVIGTERHESRRIDNQLRGRSGRQGDPGRSKFFLSLDDDLMRIFGGERLKRFMSRVGMEPGEPITHSWLNKSIERAQTKVEARNFDVRKHLLEYDDVLNEQRSFIYAQRAQILIDEHVVERVYTTIEEYLNREITALRQELKRRGRLSLGAFQQNLSTLFDYALGGEDASGWNETRLGTLKQEILAHLKKNIESKYLLAGAQNMDTFIRYQYVQAIDKKWLDHLELLEILRESVYLRSYGQKNPLTEYKLEGFDLFYTMLDDIRLSIASQVVRVTVHMEEQRVPRPPHVAQAAHEFQALGQPGRGHGSLSALPIQAGAKVGRNTPCPCGSGKKYKHCCGR

SEQ ID NO: 76491 - protein, 149 aa, Treponema pallidum
MEDNAFTGAYSYNLDEKGRLMLPARLRVALSDTRLVLTCAIESCLWVFPRAQWDRFSSQISARASLFHAPSRAVLRRLIAPAQEVELDRAWRLFIPPSLREYAALEKDCLILGLSHCLEIWDRARYRAYLAESEADFRAGTETLQDLCL

SEQ ID NO: 76492 - protein, 379 aa, Treponema pallidum
MSLSGHTHTKEEVQAEVEAGEVQCPALCHQPVLVQECLTLLEPAIVGISRGADSTRDGAGAFFIDGTLGDGGHTQAFLHAYPALRALGVEIDPSMLARARARLTPFGKRLRYVLGWSDVFFASAYASAPASPATGRTAAGAAGVPGAYPAPQAVLLDLGISFFHYRGAMRGFSFAEEHMLDMRLDPQASQTAADLLNRLPQARLAQLFFEGGEERYARRIAQAVCAQRRQAPFCSARAFAEVVARVVPPMRTARFGKRRGVLGVLPKLHPATKAFQALRIAVNRELERLPRLLTAAFTALAPGGRLAVISFHSREDRIVKVHFRHWAKRCSCPARVPICSCGGVARASLITKKPLVPSCVERAANAASRSATLRVIEKR

SEQ ID NO: 76493 - protein, 459 aa, Treponema pallidum
MLLSFDEVCAAVQGARVCDARGARGFDGVSFDSRAVVPRDLFIPLRGAHVDGHTFVEEALQKGAVATLIDQRYPHAGEYVAWCTRFGAACIAVHDTLRALQDLASFYCKKFPALIRIGITGSSGKTTVKEMARAVFSERYRVVATPGNLNSEIGLPQSLFFVRAEHEVGIFELGMNRRGEMRTLAQILVPHYAIITNVGCAHVGILGTQQAIAEEKKEIFSQFTEHSVGFVPDDAYRVFLSNIPYGRVVVYDQGGRGLATEVIDEGLRGSRVLYQGRWIRVPLPGVHNAKNALAVIALAAQVGLPAEEIQRGMERVKPPFGRSHVVCASLTFLLDCYNANPDSMAAALHLCAHISAVSKVYVLGDMGELGVTAAEAHYRVCVLAAASDARAVYVFGPEFCRAVRKVSWGRKRVYAFALEELSALQETLDAQLRRGDFVLVKGSRSVALERLEPLLRKER

SEQ ID NO: 76494 - protein, 384 aa, Treponema pallidum
MRPMISIEKNVHQERYSFVFILLVALMVGVGFVTLYSGSVHYAQRFFRYPGYFLVRQGVSIGIGLVCLLFFTFVRLASLRKALSPLILVAFALCVCTFFPGIGSTRNGATRWIKVFDINFQPSEFVKLVLIVFLANFFDKHREHFDTPIRSIFPPFVVSVIFVSVVFFQNDFSTAMFLLFITVVMFFIAGAPLWWFLRGIMVLAPIAVLMIVTSTNRLRRVLSFLYPDRDPLGAGYQVNAALEALMDGGLWGRGIGNGVRKIASVPEVYSDFIFVVIGEEMGFIGVCLYLMLLFAFTLTGISIALRCANRFNTFLAFGASAAIVLQSILNVAVVVRLVPATGIPLPFFSSGGSSIVVTLSLCGLIINVSGDEKIRREREETVFV

SEQ ID NO: 76495 - protein, 271 aa, Treponema pallidum
MKKQFLCRNTEACKYPLVGYMSMRVRVAVLKVVIVILLLVLCVEFVFYLFVVPATSFAKVEFSGNVTISPEYLMKAAGLTGKEKWMSLDGFTISERLASVPLLAQVEVLKKFPDTMHVHVVERVAIALGFVHVQGRAMPVQIDKTGTVFSVGTAPLDTVLPVVSGLEFRNPRVGLRVHDQLVPLFVQLDNLSKRNPLLLGEISEISIEQKRHGGYDLALYLVRAPIRVRMDKNLSEEKLRYVILLVDALREWQTQRRIKELDVRGGTAVYR

SEQ ID NO: 76496 - protein, 414 aa, Treponema pallidum
MGEVIVGLDIGTESIRAVVAERLEGGALQVVGVGVGHSKGLRRGVVVNIENTVVGIHHAVEAAEMMSGIEVAHCVVGLGGTHIEGRNLKGVVAVADKGKGHREVDQSDIDRVLEVACAVSLPPDRKILHVIPKVYSVDDQHGITDPRNIIGVRLEGEVHMITGSATCMRSVIDCVKRANLHIDFLMHNGLAAVRSVLNDDERNVGCVLINIGGGTTDVIAMYKGSPVLITSIPVGGSQVTSDLAKVKNLPLETAERIKIKDGCCWIPLLEGEGSVLISSQGNRIPVEISKREIAEIIEARMCEVFTIVRDRLSTVETQSGRGIIENIILCGGGAQLTGAVELASAIFDTPRVHLGIPGTLGGLAGEYRSPEFAVVLGLILEYTHKQGQRAYQGRAEMERAGVFTKVKDIWRNLF

SEQ ID NO: 76497 - protein, 418 aa, Treponema pallidum
MMNIELAPSGEEFTLSPTVIKVIGAGGGGSNAVNRMMSCGLQCVEFIAANTDVQALSYSTAPKKLAIGTKVTRGLGAGGDPEIGEKAAMEDAEAIASALQGANMVFITAGMGGGTGTGAAPVIAKIARELGALTVAVVTKPFRFEGRAKMMLAERGIEKLRTHSDTVIVIPNQNLLSVVDKRCPIKETYLVADDLLRKSVQSISDLITLPGEVNLDFMDVKNTMEGQGYALIGVGEGEGENRAVDAATAAINNPLLEETRIEGATRLLVAVRGSENLSMGEVDGVMSVVAKTIDPDAIIIHGTSIDASMQDRVRVTVIATGVPQASISIAGDTHSSQKIKTSSYGAVSTGVYISSDEWNRAKSSKQPNLPGLATRNSAVQETRMEKNGVKGHTFGVPLPSVNEDLDEPTFLRNRNKGL

SEQ ID NO: 76498 - protein, 306 aa, Treponema pallidum
MKDVDIRVQSFYAYLISAEAHALLTARTYVTTLMLFQKNLDPPCNIESANAHDCVRFIEKRSAAGVSGKTIAKDMAALHAFYQFLILEQVRPDNPMQDVDAPRRAYSLPRVLSPEQVNTFLQSIPLCTPGGVRDRALFELIYAAGLRVSEAVSLSLSDIFFAERLLKVTGKGNKERMAPFGEQACYFLMQYIREARVRFTSAKHPENSEKKGAVFLNRQGGRLSRKGIWKRLQDIEIRSGVETHVHTFRHSYATHLLAGGVDLHSVQCLLGHADIATTQVYTHVENGQLEACHRACFSSEGLRDEN

SEQ ID NO: 76499 - protein, 731 aa, Treponema pallidum
MEVRGLQPKRQKTFARKHLVIVESPAKAQTIEKYLGTQYVVRASMGHVIDLPKSRLAIDIEHDFQPEYITVRGRAQCLKELRTLSKQSLQVFLASDRDREGEAIAYHLAQSIQAYCDTPIKRIVFNEITPHAIRAAIGHPVPIDTAKVNAQKARRVLDRLVGYHLCPLLWHKVKNGLSAGRVQSVALRLICEREVEVKRFVPEEYWTVEGTFEKDKKSFSALLILIQGKKAVFKSKQEATSAIGLFSQSEARVSQIRSFEKNVRPKQPFTTSTLQQCAANRLGFTSRKTMQVAQQLYEGVSLGTHRVGLITYMRTDSVRVSEAAVKEVRAWIATHFSDALPGTPNRYAAKGKSQDAHEAIRPTYVAHTPERIKAHLTRDQIRLYTLIWERFVASQMTDARVRSLTFEITAGPAVFSATETQVIEQGFYRVLKMLSPKDLSKAVLPPTKEGEVVALHNVQSVQHFTQGPVRYTDASIVKMLEEKGIGRPSTYAPTISVLLDRYYVTRIQKQLMPTPLGKVISDLLTTYFHDVVDVSFTARMESKLDEVEEDKIKWNCVIADFYPAFSEKVSTVMKDLNSMRGVFDEKTDVVCSQCGDTMVKKLGRFGFFLACGKFPECRNTQPVPLAKCPRPACDGNIVGKKTRGRKEFYGCTRFPVCDFVTHFKPTFAVCPQCRCFLVEKSNRRVGTYTACVNPECRYVSPTRKNLSLGKEAVLDGSHRGAQDKGAVQHYE

SEQ ID NO: 76500 - protein, 352 aa, Treponema pallidum
MAVTSVKDKLATGEKKQRDIKSLNGRQKAAIFLVSIGEEISAKVMGELKEDEIEKLVFEIARTESVDAELKDAVLEEFQELMTAQNFITSGGIDYARGLLEKSLGSQKAIEIINRLTSSLQVRPFDFIRRTDPTHLLNFIQQEHPQTIALILAYLEPNKASVILQNLPDEIQSDVARRIATMDRTSPDVLREVERVLEKKLSTLSSEDYTAAGGVQNIVDILNLVDRSSEKSIVEALEDEDPDLAEEIKKRMFVFEDIVMLDDRAIQKVLREVNMEELAKALKVVDTEVQDKIFRNMSKRAGSMLKEEMEYMGPTRLKDVEEAQQKVVSIIRHLEDSGDIVIARSEEDEMIV

SEQ ID NO: 76501 - protein, 149 aa, Treponema pallidum
MYAPRMRLNRVDFSGFHFVGCNFFNTVFNACVFANVVMRMCFFERCYLVNSSFTEADIQFSSFEGSILHTVSFAHAVLLSDNFNRIHAQDVSFQESDLSHTRFLHATLATVRFENCTVQHTHFMPSHTTHCTFKGSSTEHARIYLSDLP

SEQ ID NO: 76502 - protein, 268 aa, Treponema pallidum
MSDRREQFQYAFLDSGIGGLPYAHALRVRVPEASLVYVADRVYFPYGNKSSAQIIARASAVLQKVQTNFSPHIVVLACNSMSVNALEFLRAQVSVPVVGVVPAIKQAVACSHKKHIGVLATQCTITHPYTACLRAQFGAGCVFQMRADARLIECLERGLIFEVEDMQREAVARSVMPFQEAGVDVLVLACTHFVHVRHLFQDCVGTSCTVVDSLEGVVRRTLRLCPPQSQLRGNAACYVTGARDAVCAARYARYAQHFGLRWAGFLDV

SEQ ID NO: 76503 - protein, 632 aa, Treponema pallidum
MSLLNSLITSLTLPQPAQPLHLSLTRSPSGWRKVFPYAFTPERTVTLTQKADAVLSAQVALSYARFLKKKVPKPRVVIARDSRPTGEIISSICTAILHLEGCSLRCVGVGPIPEIASYARNYDAFLYISASHNPIEYNGFKFGLNDGGVLSPTQAQQLSEDFVAQCLQPASFQKIREHCATLNASILEPLLYNKTHKQESLHSYDLFIREVIANSPKETEHRAFFHRFTQQRAAYSEQGTPLSILIDFNGSARAASIDRRLLESLGVALFSIAETPGDIRHRIVPEGSSLTACAQALTEAATRGSSPEERSIAFGFVPDCDGDRGNIVYYDQTLNRAVIPHEQAVFALSVVSEICELSRNLRMQPHRAPPIALVTNGPTSLRVEAIAQLLDVHVFRTEVGEAHLIEKAHLLRKEGYCVRILGEGSNGGSILHPAAVRDPLHTVFALLKLLLLRGDGKQPGLFAWWCAHSHQTERAQHAFTISDLFASLPAYTTTPTHDTRALLQIRTTDHALLKSAYQRVFERRWAQEKDTLKKRFGICSYRPILYRGREQQDAAGDFSRSADGGLKIQFYNEHQEAVAFVWMRGSKTEPIFRISADLKGNDEAGEAALLQLHADMVREADRCALSCADTTS

SEQ ID NO: 76504 - protein, 452 aa, Treponema pallidum
MFEQLSASFKRIVGALGGRATISERNIQEAVESIKRALLDADVHVRVVRRFVNQTIQHAQGQTVLASVSPAQQFIKIVHERLTAFLGEHTRSLHLKGPDTQSIILLLGLQGSGKTTSAAKLAAYLKDAGRSPLLAACDHVRAAASAQLAVLGTHIGVPVYQHALPHEQQPCALDTARGALQYARSHGNDVLIIDTAGRLHVDAALMQELILLKETLVPVETLLVADALTGQTVVRIAEEFHAAVGISGVVLSKFDSDTRGGAALSLKSITGQPLLFVGTGERPQDFEPFHPERAAGRILGMGDIVSLVEKAQKAFDAQEHARAQKKTQSHERFTLSDMLDHLQTIEKMGPLHSLVEMIPGLAVAVSADALDARAFKRQKAIIQSMTVQERDNFLIIGPSRRRRIAAGSGTSVADVNRLIKNFERMRTLMRKTAWQSRRAHPKGDTPYGWPHR

SEQ ID NO: 76505 - protein, 559 aa, Treponema pallidum
  MISC_FEATURE (236)..(236): X=any amino acid
MLCTAPLVSSAASAVLLAFAIPNEFWLAGSSVLGLGALVPLYVGFLLSPAKKHVACSYGLFVALVHACSSFWLKNFQGFALFTLGASTVGYFFYALPFGVAFACILRKQAPARACAFALVWTLWEWVKSTGILAYPWGTVPMTAHSLSHLIQIADITGVWGLSFLIPLANACVAESLHFFIKKRDSVPVFRLWLLTGCLYCLCSLYGAYRIATLGAPRTTLALAIVQQNADPWDTXSFEKNLTTAIHLTETALRTQTAPPLPTTPYRKEKTLTHASARAPVDMVVWSESSLRYPYEQYRHVYNALPAARPFSAFLRTLGAPLLVGTPLRLSGNSTKGGYANAVALLRPDGHVAQVYGKMQMVPFAEFIPWGHMTSVQRLAQMLAGFSESWTPGPGPRLFHVPCAAGGSVRFATPICYEDAFPSLCAALHTQGSELLINLTNDSWSKTASAEWQHYVVSLFRAIELRTTLVRSTNSGYTVVIGPEGKTRAAFPLFQATSAVLHVPVYPVVRTYYARMRDWVIVLCALIFFAEGVRMAVHTRRHSTTQAESSLQQIRGEHV

SEQ ID NO: 76506 - protein, 360 aa, Treponema pallidum
MFSSSPPSSLPKSVSSPSPCAARTGDRGRGLSGLIEFIDAHRAFAVVGHEKPDGDCVGSSLALASFLRRIGKEVELLSAGPFKRREIAAYATLFRPSLSAQIRPSDQTAVIVVDCSELSRVGAELASQLAPFARAFIDHHETCGDHCAHSFVVKTAPSTTTLVQTLIETMAGSLEAAEARALFLGLATDTGFFRHLDEHSADTFASAARLVRAGANPKDTFLAMNGGRSLASRMLIARVLSRLTPYYGGALMTSYETCEDAVQLGLDVRDSDALYQLIQSIQGVEAIVVVRQESPTHCSVGFRSRGSIDVSVIAARFGGGGHRCAAGLRIEGTVDELLPRFVAAFEAQMRAPAAGAQVRS

SEQ ID NO: 76507 - protein, 269 aa, Treponema pallidum
MRAVDFLRRATVCWYMRIYLASNNAHKHAEFSSLFPMHTILLPKDEGIDFFSPEDGSTFFANARQKADALYDVVHAPVLADDSGLCVDALDGDPGVHSARFGAQHGVHTDTARMQLLLERMHGRQDRACSFVCVAVLKLGSVPLCVGRGVCRGVLTTEMSGVEGFGYDPIFLLPHLGRTFAQLSIEEKNRVSHRALAALRLAQVLAMMQLPRALRYELKLLRGARRMTRGGVLRPGAPCAQRKGQTAQTARRHKFYARARRCARRIHRA

SEQ ID NO: 76508 - protein, 170 aa, Treponema pallidum
MYHGPTLHHRRVPMAVNDEQFQLVTFQLGEELYGIDIMGVKEIVKVQDVRPIPCAPAYVEGIFNLRSEIIPIINLHKRFHLREATLESGDEYLGGFVILNVEDSKLGIIIDRIARVIAVSQEDVQSPPQVITGIGAEYIHGVVRQGTSYLIVLDIHKLFSSKELQKLANL

SEQ ID NO: 76509 - protein, 305 aa, Treponema pallidum
MSSRVCPQRPVAKSSGDAKVLLIVSTYKPRAAVLAADVVNFLSIRGFQCHTIEYDGLNKESCARAGYMFAVSIGGDGTTLFAARCASPSGIPILAINLGRFGFIAPIEPRYWQQALSDYLAGGVRPAERALISCTVTRAGKEIASCLALNDVVLSSGRVARLTRAEVCFNDISFGVYEADGIILATPTGSTAYSAACGGPILDPDLDAFVLTPISALCLSNRPVVVPSSGVVRIKVLSMRHKETVLSVDGHELCTLQEEDQLLASRSSCSARLVFCTPHVFYHALCSKLAWSGSIFSRRGRRHDD

SEQ ID NO: 76510 - protein, 404 aa, Treponema pallidum
MDSSAGVSPCNSPYGSGLLDVPLKLRPRASHYRARSLVIGGKEHVRALPLGGDAPIPIQTMWKEPLIGADLQSIVDRLLELEQLGCDVVRFAVPDRESAELFVALCARTRMPLVADIHFDYRLALRCMDGPVAKVRINPGNIGVRERVRAVVEKARATGTALRIGVNTGSLPGVVKRAVAARYADGMQSVNARAEALVQTAFAEAAYLDQLHFDRVVLSLKASTVAETVRANELFAQQSDIPLHLGVTEAGPLVSGIVKSTLAFSQLLSRNIGATVRVSLSDSMEHEVLAAREILAECGKRAGGVRLVSCPRCGRIGFDVHAFVRRWQKELFSLKKDITVAVMGCVVNGPGEGKHADLGISGAEDSVIFFKRGKIVRRIQVRDLCADERTRIIDAAFKEELSSL

SEQ ID NO: 76511 - protein, 360 aa, Treponema pallidum
MEGQTARRVITEAKFLDDCLTERDSYYLSKLDELYSSAMSSFAQFEDQQNGARSARAEENIIATYDSIGNLMQEICKELPALKVYSFETQRENHAEVSRVVSKLRNIHTGYSEFIYYTQRAFEMLFRLAYGGSHEEHKTYLITKTPVAFPVQNYAVHKIANVDYKIENTVMCVMLRGALLPSMIVSKEIEEYSSHGYVTPFALFKIKRDDLRDERDMQYVFDLDKSYFSARELDGKDLVFADPMNATGGSLVTIVRYLQDLGVKPKSISCFHMISALKGAIRVVRSLENCTVYTLWMDPVLNARAYIMPGLGDAGDRVNGVDVEDYPRNIIQLLADYGSNISGLYRSQLRKIEETVLGSR

SEQ ID NO: 76512 - protein, 1091 aa, Treponema pallidum
MYTPVDPKVDFVAQERRILAFWRERRVFEQSVAQRAQGKSYVFFDGPPFATGLPHFGHFVPSTIKDIIPRYQTMRGAYVPRRFGWDCHGLPIEHLIEQELNLNSKSDVESYGVSAFNAACRSSVLRYVKEWQRTLTRLGRWVDFDNDYKTMDVCYMESVWWVVAQLWQRKLLYEGYKILPYCPRCATALSNHELNLGGYQDVSDPAITVRFECTSVVPGSPAAREFCAAASWGSASLPAHTCFLAWTTTPWTLPCNAALALGPQILYVLIEANDEHYILARSRLEFYYPDSSAYRVVWEKRGEHLAGIRYRPLFSYPVFGQGPDPSVQGDSEEGLFCTRVADFVSTEDGTGVVHVAPAFGEDDYEVFKDAGISIQCPLDAECRFTAEVADYQGLFVKAADKAIIARVQKQGALFRREQISHAYPHCWRCASPLIYRAVHSWFVAVEKIKDKMLAANASICWQPSHIRDGRFGKWLVCARDWAISRDRYWGNPLPIWRCVHCGATDCIGSRTQLYERSGMLLEDLHKHVVDMVTIPCACGSVMRRVPEVLDCWFESGAMPYAQQHYPFEHATDFERYFPAHFISEGLDQTRGWFYTLTILAVALFERPAFENCIVTGLVLASDGKKMSKALRNYADPNEVMDRYGADALRLFLVRSAVVRADDLKYSDEGVKDILKTVIIPLWNSYSFYVTYANIDGIDPPVCAKVDGMGQAVTRLATHLNNPLDRWILSLTEKLVQDIACALDAYDVSKVADPIVSYVDQLNNWYIRRSRRRFWKSINDEDKRCAYNTLYCVLKRCVLAIAPVVPFITESIWQNIRAADDVQSVHLADYPVCTPMVRDDALEFKMETVQRVVSMARAIRAQCNLKVRQPLKAMQVITRNPMERSALLEMEEDVLDELNVKELVFHEKEDEIVEYRAKANFRVLGKELGSKTKRAALSIERLSSAEIQEILEGTTLYLDVDGDRLELTEEKILVQRIERESLKAINEGTLTVALDTTLTEDLLLEGAIRDLVRGVQNLRKERGFSLVDRICLRVFSSDQDIVCARKAYDLHRSYIVGETLAAHVQWARVRDGASAVYVKSDAVLWEVSIDKA

SEQ ID NO: 76513 - protein, 261 aa, Treponema pallidum
MCRLQPFFRLRLQVYLARSGCASRRACEALIASGRVTVDGQTVTTQGRTVCAQNVVCVDGTVVQLERVQRYVLLYKPVGYICSLAPQFPAGYAHTQVRAGPSKQEYARAIDLVQPAYQERLYHIGRLDVRSEGALLFTNDGSFAQALGHPRSGIEKEYIVETREPVPAALLSSFVRGVWVEGCRYRCVRARHLAAQCVQLVLVEGKKREIRVVFEAWGQDVVRLVRVRIGRVRLGPLRPGAFRTMRLQEVAQLLQCAGCAR

SEQ ID NO: 76514 - protein, 369 aa, Treponema pallidum
MCQKSSPCTYARVRSLPSVRLFSFLALAFASFLRAEDAFDHFREGERLLSLQQAQQAIGPLHKAAQQKPAHPKAALYLGMAYLQTGRYTQAIQWLQNPPVHSQEYAHLYAYNLGNVYFVQHRYEEAQHAYEQALALKHDYPPALLNRANTAMKRQAYAHALADYKKYVSQNPTASQHYEVQRMIAALEQWLQRKEAEEARRKEAEEARRKEAEEARRKEAEEARRKEAEEARRKEAEEARRKEAEEARRKEAEEARRKEAEEARRKEAEEARRKEAEEARRKEAEEARRKEAEEARRKEAEEARRKEAEEARRKEAEEARRKEAEEARRKEAEFEALKRALRLKQAEDARTLSTGSEDTVPYQEEHNLE

SEQ ID NO: 76515 - protein, 535 aa, Treponema pallidum
MNWRNLDECAAYARLQAIRAPSLKTVLCGPEGIERVRRYCTDAGAGLRYHYAAKTVNEEILTALAALADEQELVAKYDALRAGAQINTGEKRKVLHHLTRLGVQGSSLASLPCEVRDMHAFYTKEYERVCAFARQVHEGGLRTSRGAPFTDVVQIGIGGSDLGPRALYLALEGWAQRHQAVKMRTHFISNVDPDDAALVLSKLPLETTLFILVSKSGTTLETLSNELFVAHVLRQAGLEPHTQFVAVTSETSPLANNPQYLASFYMDDFIGGRYSSSSVCGAVVLTLAFGPQVFGHFLSGAAEADRAAQEQDIRRNAALLDALIGVYERTILGYEHTAVLPYSQALARFPAHLQQLDMESNGKSVNRFGIPITYKTGPVIFGEPGTNGQHSFYQHLHQGTSVVPLQFIAFQHSQLGQDPIIRGSTGQQKLLANVVAQIVAFARGKEHADANKTFSGERPSSLLYAKALTPQTLGALLAHFENKIMFQGFAWNLNSFDQEGVQLGKTLAQHILAGEVEGVLRAYADLFDLAHAPTC

SEQ ID NO: 76516 - protein, 515 aa, Treponema pallidum
MGKISGSGTVAPHILVIFGASGDLAARKLIPSLWDLFEQELLPRTFGILGAGRTALSTESFRARLAEAVTKHAVRTPHDPARLTEFLQKIHYFSFDPTDSVAFADFATYVRTLDQSLHTEGNFIFYLATPPSLYETIPTQLAMHHLNREQGNFRRVVIEKPFGYNLETAQHLNASLRAHFQENQTYRIDHYLGKETVQNILVTRFANPLFEPTWNRTHIDYVEITASESLGVENRGGYYDQSGALRDMIQNHLLLLLGIIAMEAPAVVSSSRLRDEIVKVFDCLRPMGERDVMQHTVRAQYVAGKIRGVAVPGYLEESGVDPRSCTETFAALKCYIDNWRWMDVPFYLRTGKRLPTGVTEVIVHYRTLPIALFEHIERPCAREGNALVIRIQPDEGIQLKIDLKEPGAGFKTIPVSVDFQYSALTYSHLPSAYERLLLDCMNGDNTLYHRDDAVESAWRFIDPILAAWKSNKSPLLTYPAGSWGPKAADDLIKGSAPRWHHPSSTLLSDDFACRL

SEQ ID NO: 76517 - protein, 845 aa, Treponema pallidum
MCGATACGARICKAERQEHCEGAVPYGYAHPFCTVLVLISLREGVYPFTHCGCLRSELCVGSNGRCPKRAAPDALHMCLRGAHAPCGAELFPVKPCKRKNACGRIGPRWVKGLVTFHSHIIIPREWLMGYGSSAEETSSTPHASGQRKVGFLSLRTKLALVFGLLAFVSGLVQGGILVVFARNSIVGEISSHLAGRARDTSSIVEGRIGALFQFLEGLARLEVLQGSSDRRRAQVDRLKKEAFFNRDIARLAVVDLAGVLYGEDGRTHYVQDRKYFQRAVKGRCYVSAPYPSRSSDDMVITFSIPVYDEDRRVIAVLVADVIWTWLCDITGDFSVGGVGRIAVIDEVGTVVAHPRHEVVAQQTNYIRLAKEDPATYASVAEFVEKVIKSDSTASHVFSYEGLEKIGSSAKMKSTGWTVVVFVPVSEFMGPVYTLQNYLLAVGIIVVLFSLIVVYAVARKIVRPLRSTVRVLEDIAYGEGDLTVRLPVVGGDEVSLLCQYFNQTMEKIRFAIATVGSSSDDMRRIGDELASNMTETASAVNEITANIDGVKHRVDLQVSGVSEATDTVERIIKTIKGLNSSIETQAVNVAQSSSSVEQMVANIVSITQTLERSDEAVHSLAIATADGRDTLVSSSGITQKISEESGSLLEASSVIQHIASQTNLLAMNAAIEAAHAGEAGKGFAVVADEIRKLAEESSTQGKTITETLKTLSVEIDTLSTSSKAVEEQFDTIFRLSDQVRTMSRSLTEAMKEQSDGSREVLAAIKSINAATVDVKEGSADMLKGGEVIAREMQRLDDLTSEIARSMNEMAAGAIEINNAVHEVNEITQRSKQSISSLADEVEKFKV

SEQ ID NO: 76518 - protein, 322 aa, Treponema pallidum
MRVHFWGVRGSVPTPVTPRQVQSKIAAVVQRISAKDVRNQRSKERFISDLPAWLFGTTGGNTTCVEMETDCGETLIFDAGTGIRDLGIDLMSRPGYRAQGHVYHLLFTHFHWDHIQGLPFFNPAFDPRNTIIVYSTRKKMKEFLEDQMRYPYFPISMFGRDGFNAKFEFRLIGNHEECFAIGKTKITWNRVRHPGGCVSYAVSEAGGKKVIFSTDTELRQKDFDRSERNVCFYDAASLLIIDSQYTMTESIKKEGWGHSTFSIVVDFAVSWGVRRLALFHHEPTYDDKKLFSILQNACWYRKYVGAHDLEILLAQEGKDIFV

SEQ ID NO: 76519 - protein, 605 aa, Treponema pallidum
MARISAHVIDAIADRVDLVSLVGNYTHLERRGDDWWGRCPFHHERTPSFHVVPDKKMYYCFGCGVGGSTIKFFMEIEKIDFHEAAVRLAKRAGIEMSFEDGVHAPSAHASFTMQLCEVYQRIAETFHHVLMHTAQGARARAYLASRKVTDDSIRTFKLGYAPPDPVWLFQFLRHKGYSPEFLARSGLFAKKSERIAVFSDRIMYPIADRYGQVIAFGARALGTAPAKYLNTADMPQYKKGEHLFAFHCALSQMRKTRAAIICEGYMDVIAFHQAQLTYAVAPLGALLTKSQARLMRSFVDRIYMCFDADGAGRAATYKAILLCRSLGFEVRIVELNGGTDPAECACIEGEDALRKSVERSTTDAQYLIRCARHEHSHLGADDTSRAVSFLFPYLSVLDSAIQREQVMQDIAMAFGIRIQAVHADYLRYVSRTTQKGTTGNCVLSVQGTAIQVKEPATGVRTAQLRLVLAVVANPELFELLRESVCADDFEDPMAKELFIILEECYRADTRASPHVLSCCTTDELRKLVSEAIVCGEFSCNAPQIVRDGVALVRRNRLLKERESLVGRLRRFGDASSGEECGSMQELMMEKQRVDEELERLKGVRK

SEQ ID NO: 76520 - protein, 611 aa, Treponema pallidum
MMELSRTPAVMRLLEYAREKKAITHDEVENILAHYGVETEELLHDVLDMLEQENIKVFSSEEEELEDEVFAGLKGPAADDGDGSFPLSTERVRDKLCDSSRGARQNLLSNARNIALDDPVKLYLRDIGQEKLLTAEQEVMLSKRMEEGEGIIKDIITQSGLLLPEFYHIGRSLSKKALAVLDPAESGRTRKEISEEMADRRRLKQAYGEVLRSLYPEMRHYMAMKKRLDERGEPVTVLSSDEEVCKQRDKLLSCLQKVDLQLEEIDRFSRKFLDTARKIREYKRRKDRHEKQLMIADLCDMRKIGRGLAVPRQRAKLEETLGMSADCIQEIYTQIQKVTRRLRRIEYDFENTIDGILSMARAIHRGHVMLKKAKDKLINANLRLVVSIAKKYTNRGLLFFDLVQEGNIGLIKAVEKFEYRKGYKFSTYATWWIRQAITRSISDQARTIRVPVHMIEQINKVTRESRQLLQKFGREPSDEEIAQQLCWTVEKVKQVKSVAREPISLETPIGEEEDSSLGDFVPDADVENPSRVTERVLLKEEVRSILSALPAREHEVLRMRFGLDGDYSQTLEEVGLYFDVTRERIRQIEAKALKRLRHPRHSRRLKDFLDS

SEQ ID NO: 76521 - protein, 344 aa, Treponema pallidum
MFFLRRFSADVGIDLGTCNTIIYVEGRGIVVNEPSVVAVERGTKSVVAVGSDAKRMLWKTPGNIVAIRPLKDGVIADMDTTEKMIRYFISKILPRHRLIKPRMVIGIPSCITDVECRAVHESASKAGAGEVEVLEESLAAAIGANIPIEEPAGNMVCDIGGGTTEVSVISLLGMVVTNAIRVGGDEFDQAIIKHVRSVHNLIIGEQTAERLKIEIGNASPEKNIEKVEVKGTDAITGLPRRLEIDSVEVREALKEPITQIVEEIKRTLARTPPELAADIVERGIVMTGGGSLLKGLPKLISKETHVPVILAENPMNCVAIGAGRYHEVYKDISGDRSLYAGLNS

SEQ ID NO: 76522 - protein, 415 aa, Treponema pallidum
MLRSKGDLVLGCSFCGKKEDERRRIVTGHGVSICNYCVERCAEYLRDRKPSALALMTKEEIPTPLELKAYLDQYVIGQDLAKRVLSVAVYNHYKRVAGRSLDIDSVLIEKSNVLLIGPTGSGKTLLAKTLSQKMKVPFAIADATTLTEAGYVGEDVENILLKLVQNANGDVALAERGIIFIDEIDKISRKSENVSITRDVSGEGVQQALLKIIEGTIASVPPQGGRKHPNQDMLRVDTSNILFICGGAFVGLDGIVGTRVCKNPVGFGADVKTVKERGLQLMHEDVIPDDLVKFGLIPEIIGRLPVTVALDALSKEDLRNILVRPRNAIVRQFEALFALDDVRLVFDEDALDAIAQQAIDQKTGARGLRSIVERLMLDAMFEAPSLKGKKELCITKKVVTQEEKASVRLVSERTA

SEQ ID NO: 76523 - protein, 188 aa, Treponema pallidum
MESLIGKRVIDFKLPAYVGGKFTEVSNASIKGSWAVFMFYPADFTFVCPTELADLARVYPSFVEIGCKVYSVSTDSEYVHKAWADATDTIKNLPYEMISDKAGKLAGFFGVLLPDTWHALRGTFVVDPEGLVKAFEVHDMGIGRDADELLRKVQSAQFVAKHGDQVCPARWKPGAKTLKPGIDLIGKI

SEQ ID NO: 76524 - protein, 399 aa, Treponema pallidum
MRRGGACVQKKEYLPLTSRQPGVCLLSEILVRALEARSFFLVVVTVPAGEVAYAESQVACDSRLSAFPSRTRPVILYVPGAHTRSASVRAGLDAMATHAPDVVLVHDGARPFVSVALIHSVLEATCRYGAAVPVIEATDTPKGVAADGSIETHLIRSRVRLAQTPQGFCYASLCAAHHRAATDGEQYTDDSELYARYGGTVHVCAGERSNVKITYPEDLEQRASEPALTRGISVLPCTEEGALRVGLGTDMHALCAGRPLILAGIHIPSKKGAQGHSDADVLAHASIDALLGAAGLGDIGTFFPSCDGRWKDAHSCALLRHTWQLVRAACWRLVNLDAVVCLEQPALHPFREAMRASLAQALDTHVTRVFVKAKTAERLGPVGSGAAVTAQVVVLLKKI

SEQ ID NO: 76525 - protein, 466 aa, Treponema pallidum
MRVIVVGCGTNGRELTRRLSARGHQVTLVAAAHEPVPRKIPAGAQALVRHQKDHRATLGEAGIAKAQAFVAVTEVDELNIVLCGIAADLNAGVIKIAQTHDDHYAHAVCRESRCIFGIDFLISADKEAMRAVVSTVEQGAISDVIPLKNAPYEIARFPIAKGSGLDGITLSDMRRLVKISFVAVAFEVRGRSVIPSGETMLASGMRLSVLCAPEHMGRFYELAGFKIHPVKKIALIGMSAVGTLVAQDVAEKCKPHFFSSAFSLSPRERASLVLVDKSETATQAVCAQFPHVTAYHGDVTDEAFFAEITPDTFDLVITTTNNYELNMITAAYMKTLGVPRAVALVHSSLMEDIAGKIGIDVAVSYQDVVVDAIMSHLAGSHVTGIHTIGDGSLEIVEFAISAQSPLVGKRLKDIAVHGSFLVLLISTVRGSFIPSGDTVLLEGSVLMFIVQSAQSEKIVALLGGTV

SEQ ID NO: 76526 - protein, 960 aa, Treponema pallidum
MGSAARNLCIKGAREHNLKNIDVMLPRDALVVISGLSGSGKSSLAFDTIFAEGQRRYVESLSAYARQFLGRLDKPDVDSIEGLSPAIAIEQKTTQRNPRSTVGTVTEIYDYYRLLFARIGRAHCPHCAREIKEQTVDQIVDTLMTVPSGSRIQLLAPVVRGKKGTHHKVLEAARKDGFVRARIDGALLHLHERISLDKQKKHSIDIVVDRIQLSDTVRKRLTESVETTLGYADGLLTVLVQGENSGTVSGKIETSALLPSELFFSQKNACAHCNVSVPELQPRLFSFNAPFGACPSCAGLGIMQTFDLDRIVPDQNRSFNEGAFLPFKPEHEWNRVRFAALAEKYHFSLDDPVRNLSKHALDIILHGSGSEALEFSHERKDGSRTARYIKPWPGIFSELHRRYAESCTHSQREVYERYLSVRTCEACRGMRLKPESLAVTIEKKNIHALSALSVDDSCEFFKTLHLTEVEATIAQQILKEITDRLEFLQNVGLGYLTLERAAATLSGGEAQRIRLATQIGSRLTGVLYILDEPSIGLHQRDNERLIQTLLHLRDLGNTVLVVEHDEQTLRVADYIVDLGPGAGVHGGYVVAAGSPPEVMQVQASLTGQYLAGAITLPIPAVRRTGNGNVLTVHDVHEHNLQHISVRIRLGTFTCITGVSGSGKSTLLIDVLYPALYNRVMNGRLPEGKFSSIEGTEHLDKVIYVDQSPIGRTPRSNPATYVGVFTDIRMLFSQVPEAKMRGYKPGRFSFNVPGGRCEHCKGDGVITIEMNFLPDVYITCDVCHGTRFNRETLAVFYKGKNISHVLDMTIEEARSFFSAVPPIVRKLEALCSVGLGYVRLGQSALTLSGGEAQRVKLALELSKRATGKTLYIFDEPTTGLHFADIIQLMEVVQRLVDQGNTVVMIEHNMDVIVQADCVIDLGPEGGMHGGTIVAQGSPEAVSQITESRTGWYIKEVLCKKT

SEQ ID NO: 76527 - protein, 526 aa, Treponema pallidum
MKSKSSLLKSGLLLSLLTLVSRVLGLAREVVKSTLMGTSATADAFTVAFMIPNLFRRLFAENAISVAFIPVFTQHYSMPSSAQVPCSSKTKEFLSAIFTLMSSVTASISLIGILGAPYIVRLFDTDQSLTVSLTRLMFPYLWMISLAAFFQGMLHSIKVFVPSGCTPIFFNVSVIFSMYFLNVSHMNVAIAAAIGVLIGGCAQALFQLIFVYMHGFRFTLQSPLKAMHDEGVRRIIALLLPTTVGIATYLLNDLVCTALATSVEIGVAASVQYSLRIQELLLGIFIVSLSSVVLPDLSFHVMRKDWQSFEDLLITAIKIVMLITIPATFFVLFSSDRIITLVYKNAIFNELSVRMTATIFRWHSVGMLAIALNRVLISAFYAQHNSFAPMIAGTISFVTNIILATLLFIPLGGKGIAFSLSAASMVQTVFLWMFLKRSWQITIPSLYKTSLYYGVKITLFSVIALVPTWASSFFTAYFFPGSHKIISHGVPLCVEALIFSCTGCILLLLSRDEFAYKALRSIRFCR

SEQ ID NO: 76528 - protein, 384 aa, Treponema pallidum
MRFRARVSQSTAKCVVFTGGGTGGHIFPGIAVFQALAQQAAVRVVWIGAARGADRSIVESAGLEFCGITAGKWRRYASVRNFFDVFRVLVGTVQSYCILRALRPQALFSKGGFVSVPPCIAAWLLRIPVVTHESDISPGLATRINARFADRILVSYPHTSCYFPRARRAAVHCTGNPVRQDFFSAQAERAYQFLRIDQKKPLLTVLGGSSGARDLNARVLSCSTFLTERFYLVHQFGAGNEDQMHTITNSLSVNARHAYMSFPFIQAHLPDILAASALVLSRAGANAVWECAVLGKPMILFPLERGSSRGDQIENAEYFSAHGAACILRAQDEKGHQLVSLLTELFHPSCARIEEMARASYTLGIGNAAYDIAQQLQTFIKEGM

SEQ ID NO: 76529 - protein, 881 aa, Treponema pallidum
MAKNTDIEHDAHEPAGHGDVRESAVENPSASAVSDGEERATFAPEVAPQTDTESAQGAAQESEPEVQRAGEAEKGVPEKAKAVVPLDELLPQKVHLIPLTGRPIYPGIFTPLLISDEDDVRSVESAYSDSGFIGLCLVKTDTQNPTISDLYEVGSVARIVKKINLPDGGLNVFISTQKRFRIRKHVHHSKPIVAAVQYLSDLIEGDPLEIKALVRGLIGEMKELSENNPLFSEEMRLNMINIDHPGKIADFIASILNISKEEQQRTLEILDVRKRMEEVFVYIKKEKDLLEIQRKIQNDLNSRVEKNQREYFLREELRSIKEELGLTTDPKERDQRKFRALIDSFHFEGEVKEAVESELEKLSLTDPNSPEYSVGRTYLETVLSLPWHAPEKEEYDLKKAQKLLDEDHYGLENVKERIVEYLAVRKLRADTKGSIILLVGPPGVGKTSVGKSIARAIHKPFFRFSVGGISDEAEIKGHRRTYIGALPGKVLQGLKIVKTKAPVFMIDEVDKIGSGARGDPAGALLEVLDPEQNTTFRDHYLDLPFDLSHIVFVLTANSTDPIPRPLLDRAEIIRLSGYIDTEKVEIAKRHLVPKTLEKNGLKRACVSYRKEVLLHLVHSYARESGVRGLEKSLDKLHRKLATEIVLGKRSFDDKCLMDEALIGTFLGKPVFRDDMLKDANKVGTAVGLAWTGMGGDTLLVEAITIPGKASFKLTGQMGAVMKESASIALSWLRRYSAQQRIASPNWFEKRAIHLHIPEGATPKDGPSAGITMTTTLFSLLTQQKVKPRLAMTGELSLTGQVLPIGGLKEKTIAARRGGIKEIIMPKANVRDLDEIPEHVKKGMVFHLVESMEEVLSLAFPKGKRVRAGTAAQSASPETLTG

SEQ ID NO: 76530 - protein, 419 aa, Treponema pallidum
MMLRTCKDVTMRGERVVVRVDFNVPMRDGMVQDDTRVTAAVPTLRYIIEQGPRHVVLISHLGDPTRDADKAEGNAKKDGCPFDRHAFINGKHRLKPVADCLAKKLGVPVHFAPSCVGQREFIEGLPDGSVVLLENVRFHPEETSGDAKVQEQFARELAQYGDIFVNDAFGTAHREHASTVVLPRLMRRRVAGLLIEREVRYLEPMVCNPKVPMVAVVGGAKVSSKIAVLESLLRTSTALIIGGGMAYTFLKAQGVGVGTSLVEDDFIDTARMLLQKAQSGGVSVVLPVDHVCASTFCADAQPVAVDDVHIPMHLMGMDVGPRTLEQYRAHLKGVSSVLWNGPVGVFEFDAFAHGTRVLAQLIAEATDAGATSVVGGGDSIAAVSKFGLASRMSHVSTGGGASLKLFEGKVLPGISCLET

SEQ ID NO: 76531 - protein, 319 aa, Treponema pallidum
MVTDGASPRSGVSLIIGRPSSGKSTFLNAVCGYKVSIVSPIPQTTRNTVRGIVNIESDQIVFMDTPGYHRSDRKFNLRLQSLVHSNVKDADVLLYLVDATRQFGEEEAAICALLAPYQKTRVLLAFNKVDVLHNSTSCDEHAFLHRQGSVLRAGSLGRALHAALPHLPADRVFTISALHQVGLDALMRTLRDLLPEAAPLYPQDCYTDQTIAFRVTELIREQAIARCRDELPHALYAGVEDMELRRGKRELWCRAFLAVERESQKAVLVGKKGAVIRAIRLDAIRALRTLLPYHISLDIRVKVDRSWRQRDHTLSSLLY

SEQ ID NO: 76532 - protein, 495 aa, Treponema pallidum
MRAHEYALDDDIVAIATALSPAALGIVRTSGSSSIERVASFFSRAQALTRARAHTFLHGWILDGKTRVDEVVLLVYRAPHSFTGEHAVEIICHGGVRTVQAVYRLCLAQGFRAAQRGEFSFRSFFHGKRDLTRIEAIQSLVDARTCAAQQQAVLHLSGALQQEIAALTRALLAFSATLQGEIEYPEDEETRVHDIDMRELEPLVERLRRLRACWQERALQRTGVRIVLGGCPNAGKSSLFNALLGQDRAIVSSVPGTTRDWLEADLDLSGIPVRLCDTAGLRVTDNPIEAQGVVRSEQLLQGADCVFYIINGRAGVQAADCAFLSDCAVPLVVVVTHNDLMSMSERIQVCQAVQPFISAPVLSCARSQDARGAGEQCLAGGKNGEVRDRAPRAFVCVSAKTHAGLDALRAQTLHLLHGGQVPYEELSLGSERQYVLVDAAVQALEHAQEAYARGFGLDAVVHDLEEALYHCGALTGEVHSEDILDALFEKLCVGK

SEQ ID NO: 76533 - protein, 362 aa, Treponema pallidum
MEEFIFWNLSVIHAVQQAAHPVITHAVVLFTFFGGKGIALCSLWVLWCVEYRKGLAIAYALACSEGLNYALKGLLRVPRPFVRDPSVKLVFHDGFSTPSGHAQASALFVLLARSYPSAKTPVPCFCAPGCGTDRQVGDRENPSSYGQERTPLARTAWTGVAGVLFVGVIGLSRVYLGVHYPIDVLLGWLNAVLFGALILGMRRALRRGVVFFTRIQEVSGRSFAGLRFSAVVCIALLLAVGGADVSMCGAFCGLGAGHLFIFDRWVTRRAPAGGVGFHAAGGSFTQKVVRFCVGCVFCSVVSSALHALFSGAPAEYARLLRFVRYGIGASLSTGVVPLLFLRVGLAGGLPFHAPAPTAVRER

SEQ ID NO: 76534 - protein, 302 aa, Treponema pallidum
MKKVGVRVRACILCALAACATGVLANPFFGGAPARPRRQRTPELLLRRYALVHQRLGAAIVQWSKTHSTRAWWITVMLSFAYGVLHALGPGHRKAALFSFYLGRNAPVWEPALTAALLAALHGAASLLLLSAFRGVSGAIGAHSARTMWYMEVGSYGLLTFLALFSLVHELMHLFPSGGRYFSCGCSAHTAVCMRTGTVAHMQWGTMLLSGLFICPAALFVMILVLSLDAVGLGVAAVLSISAGLALPLMAVGYLAWASRAGIFYRMQKNTRHAQAVLSVVSITSYGIMLIVCTSALVASLG

SEQ ID NO: 76535 - protein, 661 aa, Treponema pallidum
  MISC_FEATURE (634)..(634): X=any amino acid
MTEEAMRAMALSIRSLTIDAIERANSGHPGLPLGAAELAACLYGTILKHNPANPSWFNRDRFVLSAGHGSMLLYAALHLSGYDVSLEDIKNFRQVGSRCPGHPEYGCTPGVEATTGPLGQGISMAVGFALAEAMLAARFNTDEHAVVDHHTYALVGEGCLMEGVASEASSFAGTMRLGKLIVFYDENHISIDGSTDLTFSEDVAKRYEAYGWQVLRGSMYSYTDIMDLTACAKRDDRPSLIILRSIIGKGAPTVEGSARAHGAPLGEAGVREAKKALGLDPACSFFVAPELTAVLQKRKCECAHVEDSWNELFEAWSTQYPEKRADWDAAFVPGGVSTSQLARVVCPHFEKGSSLATRTASGKVLDALCSVLPNLVGGSADLRGPNAVAVSSLRPFSAEHRAGGYCYFGVREFAMAAIVNGMQLHGGLRAFGATFMVFSDYFRPALRLAALMRIPSVFVLTHDSIFVGEDGPTHQPVETLAALRAIPNVLVLRPADAEETFEAWKIALLHRSGPVCIVLSRQNVPVFEKSDSSWRSTVEESGAYVVREGGATPELTVLASGSEVDLALRAAQLSKRRVRVVSVLCKERFEAAGDEVQRRIQGGARVVVAEAGVYQGWGAWAKREKCLVLDRFGXSGPGTQVAQALEFTAEALVEIILDWLA

SEQ ID NO: 76536 - protein, 283 aa, Treponema pallidum
MLRTSVLVCIGCLSAAIPARLGARAVPPLSSAVVDEAALLSVQEARGIRALLEGLARPSGDGSSRSHPSPAPEAHARTLHDGTPLQIAVLIVDSLQGDSLEDFSLRVAQEWGIGSRAQDTGIVLVIARAERKARIEVGYGLEDRVTDVHAHQLIRGTLAPCFQAGAYAQGVYETVLRLATLVRGQHEVQQFMQPRSVQPAVPRRGPVRNSAGSVFFFLLLFYCLGGRLLPGGVLWPLLFFGTRRRYDPFGSGFSGAFGEWAGDGGGFSGGGGRFGGGGASGSW

SEQ ID NO: 76537 - protein, 360 aa, Treponema pallidum
MSALFSLVAVYVLVCALHKQIKKYASVCYLGSACVSVAVVCVVWSGATKGNFGVRVLLHPLTSASFSTAIFTFVMCASVLKNGLLKQRVMGLRAELAITAAILTLGHNIAHGRDYLVRLCGSTGDLSTGFLVAGAVSMVLVLLMSILAVTSFKVVRRRMGAKTWKRVQRLAYLFYGLTYVHLSFILLPTALRGYIPSVVSYVLYTVIFATYALLRVRKALGKRKGACALCSAAVAVSFVAFVLGASHMVRHTRRAHTERTTRAKARKCSPAEMKDGVYEASAQGHNGKLSLRVTISQGRIEAVTVVGHSDDDPYASWAVEGVSAAIVGAQSTDVDVVSEATSTSEAIIRAVEKILQQPQP

SEQ ID NO: 76538 - protein, 368 aa, Treponema pallidum
MVHKSPPSRRACRKYGGVFDVAAYEARIATLEAAAAAPDFWSERARAEALLAELKTLRATLEPWRALRRESADLRALYELAREAQDASLEPELSSLFSDISARFEEASLTRLLHEEVDRLDAFVTIHSGAGGVEACDWAQMLMRMYTRWAERRSFCVHIVDLLESEGGVKSVTLKICGSHAFGFLKGETGVHRLVRISPFDSAARRHTSFTSTYVFPVLDDHVEVHIRSEDMRVDTYRSGGAGGQHVNKTDSAVRITHLPTGIVVTCQNERSQISNRATALSLLRARLYAYERQKKQQEHQRFASEKKDISWGNQIRSYVFHPYTMVKDHRSKCETGNIHAVMDGALEPFIRSYLEFLCTSTQCVEPQ

SEQ ID NO: 76539 - protein, 295 aa, Treponema pallidum
MKVGLGNLAQKIRRLLGGQAPLDETFFSALEELLIEGDLSLSTAESFCTQLRNAARTRSVHTEDALRTLFAEIMESCVRVTHLAPNPNQCSLYLLLGVNGSGKTTSAAKLAAYYQTQKVHPILFAAADTFRAAAAEQLAHHGAQLGVRVIAHPGGKDPAAVVFDAGEALRAQKRGLLLVDTAGRLHNKTHLIAELQKIDRIAQTKVSADAYRKILVLDATTGQNAFRQAQTFHEAIGVDALLLAKCDTRARGGAVFSIMQELGIPLAFLGWGERYTDLVEANAREFVSSFLHGER

SEQ ID NO: 76540 - protein, 878 aa, Treponema pallidum
MGYPFRALEKKWQAYWRDKRVFCVSEDERFPPERRAYVLDMFPYPSAQGLHVGHPEGYTATDIYCRYLRMGGYNVLHPMGFDAFGLPAENFALKTGTHPRVSTSANCDTFRRQIQSFGFSYDWEREISTADPEYYRWTQWLFLKLYEKGLAYEATAPINWCPSCKTGLANEEVRDACCERCGAEVTRRGVRQWMVRITAYAERLLSDLDELDWPESVKQMQRNWIGKSCGAEIDFPVDAPACSVHDKLPQTIRVYTTRADTLFGVTYLVLAPEHEAVTALTTHAQRAAVQAYVQRAAKKNDLERTDLAKEKTGVFTGAYVRNPINDMRIPVWVGDYVLVSYGTGAVMAVPAHDQRDWDFATRFGLPKLTVVSADYTATVPNSNSPQGAVLQRCVSDEGFVVNSGAFNGLASADARERIVAHLEMRGAGARRVTYRLRDWVFSRQRYWGEPIPLVHCPSCGVVPLPESALPLLLPETADFTPTEDGQGPLARARTWLRVPCPQCASDAVRETNTMPQWAGSCWYYLRYMDPRNKTAFCAPEKERYWAPVALYVGGAEHAVLHLLYARFWHKVLYDLGLVSTKEPFARLVNQGMITSYAYRRKNGALVPHDEVHTNAQGTYVHARTGEKLECVVAKMSKALKNVVNPDDMIAAYGADACRVYEMFMGPLEASKPWNTQGLVGVFRFLEKIWVLAGRVAAANGIPQDSRAEPPGDLHAQKKSCSMYALETLLHRTIQKVTDDTSALSFNTAISQMMIFVNEATRVARRMPLPSKMWEMFVKILSPYAPHLAEELWEMCGHTHTIAYEPWPQVDPARVAPHVCSVVVQVNGKVRDTFSVAPNAPNEELEQKARETAGARKFLGTQQPKRVVIVPNKLVNFVL

SEQ ID NO: 76541 - protein, 88 aa, Treponema pallidum
MVVKTVRVLNRAGVHARPAALIVQAASRFDSKIMLVRDTIRVNAKSIMGVMAMAAGCGSELELVVEGPDEVAALSAIERLFQNKFEEE

SEQ ID NO: 76542 - protein, 319 aa, Treponema pallidum
MLKLDLKERDSLDLRCIAGHHGLANPITISDLNRPGLVLSGFFDFVAYRRIQLFGRGEHAYLLALLEQGRYGAIEKMFTFDLPCCIFSHGITPPEKFLHLAEPSSCPILVTRLTSSELSLRLMRVLSNIFAPTIALHGVLVEVYGVGILISGDSGVGKSETALELIERGHRLVADDLVEISCVNGNSLIGRGVHKSIGHHMEIRGLGIINITQLYGVGSIRERKEIQMVVQLEEWNSSKAYDRLGTQELNTTILDVSVPLIEIPVRPGRNIPIILETAAMNERLKRMGYFSAKEFNQSVLKLMEQNAAHAPYYRPDDTY

SEQ ID NO: 76543 - protein, 202 aa, Treponema pallidum
MVPAFLQVVFPLVGCAHYILWGRAMRKVIVYGVVLCLCVPCFTASSDKAAQVPSVQKEMADPVEGIWKSVDDNTGKPTGVWRLYVQDGKLFGKILVCMGRAPNAAVVSCTRTYPDFSKKGNVANMPLVGTPFIYNLERTSPGSWGGGYVIDPASGKYYYCKINFIPADGRSYKVDTLQMRGEISWGIGQKPVLAQVFPDGSR

SEQ ID NO: 76544 - protein, 211 aa, Treponema pallidum
MRFVFLGPPGAGKGTLAGEISGRCGVVHISTGGILRAAIQKQTALGKKVQKVVEVGGLVDDQTVTELVRERVSHEDVVSGFILDGFPRTVTQARCLEDIVPIDYAVSIVVPDDVLVARLTGRRVCSACGSSYHVLFAQPKREGVCDRCRGVLVVREDDKMSAILQRLTAYRAQAEPIVHFYSERGKLVSLNGAPPISDVVLEFQERFAQSR

SEQ ID NO: 76545 - protein, 287 aa, Treponema pallidum
MSAEIKRLLIFFFGVPTILMLVYAAPHAHFLAFHLVIFGSVMGAVWEMHAMVSRRMCTYPLVLLIPFSLVLPLLGYAALWQPARGAESVLFIGALGTLLMSVFFTELVYSFSASFENALERMASALLLVLYPGIFSLFFSLITRWRHAEIALVIFFLMVFTCDSCAWFCGTLWGVNNRGIIPASPKKSIAGFIGGFAGSVGAGCFGSLVFGSRVTLSLGMLMGVGALVGLTAIVGDLVESVMKRSAQVKDSGFFTPGRGGIMDNLDSLAPSLGTFYIACECFGIAAV

SEQ ID NO: 76546 - protein, 228 aa, Treponema pallidum
MQHVAIIMDGNGRWAERRGLRRSAGHRRGLQTAREIVAALCAIRVPFVTLYVFSTENWKRSAHEVHFLMNLIRWYLKKEMSFYVEHAIRVVHLGCAQTLPPDVRSQIEYVVERTRSHRGTTVALAINYGGKDEILRAVKKVLCSTSCPDGELLTEEAFGACLDAPQLPSVDFLIRTGGQQRMSNFLLWQSAYAEFYFTDILWPDFRVEDMLRALDEYRLRTRTFGGLE

SEQ ID NO: 76547 - protein, 183 aa, Treponema pallidum
MGIAECYEQKMKKSLSALQEGFNTLRTERATAHLLDQITVDYYQQPTALSQVATVSVPEARLIIIQPWDKTLLADIERAILKSKLSLNPSNDGKVIRLVIPPLTQERRKELVRQARALAEQARVAIRNIRREGIEEAKRGHKEGLLSEDALKAAEEAFQKATDASVADVARYLAEKEKDILEG

SEQ ID NO: 76548 - protein, 290 aa, Treponema pallidum
MEIAARDVKSLRDKTGAGMMECKRALQECAGDALCAEKYLKERGLAAIENRRGRATAEGVIVIKARHAEGAACGASAVAMVELVCETDFVAKNAEFIALAERIAQAVLEHAYTEVNQVLRDMVVDLATRVRENMSLTRLALLRAGSAGAGQYLSHYVHPDKKTGVVLSFSSDAPDVFLRSDVRAFAYDCCLHAAAYTPRYVRAEDVPAEYVREQREVFQAHVASLQKPAHVKESIVQGKLEKHLAEICFLKQPFVKDDKLSVEKKMAEVGARAGGALRFTQALIYQLGVQ

SEQ ID NO: 76549 - protein, 291 aa, Treponema pallidum
MAVVTIKNLLESGVHFGHQVRRWDPRMKKYIFAERNGIHIIDLQKTITAIREAYDMVRRTVSSGKSVLFVGTKKQSQQTIAKEAQRCGMFYVTNRWLGGMLTNFSTIRKSLSRLKKIERMEIDGTFEHLSKKEVASLRKEHAKLEKNLGGIKEMKELPGVVFIIDTRKETIAIREARRVGIPIVAVVDTNCNPEGIDYPIPGNDDAIRAISLFTQLIANAVMEAGNEHGLKIIENLQDEESGDELDESVSLHEEGREITDYENYTPPEEREYSVNDEGDVFDEDESLYEGR

SEQ ID NO: 76550 - protein, 523 aa, Treponema pallidum
MRAMHPLLKEILTHPPSGQHECVHGWVRSKRETKRAVFISLSDGSCPDTLQVTVPLPECSASLSSGAQAEQIPNVRDAVLQGETLAQTLKRVTTGACIRAEGALVPSPGAGQALELRACNLTVLGEAPAETYPLQKKSHSFEFLRAHAHLRARTSTFAACARVRSALAGAVHRFFSERHFQYVHTPIITASDCEGAGELFRVTTFDPVRIAREAHAAGAAGNPYALTYADDFFGKAARLTVSGQLQGEAYALALTRIYTFGPTFRAENSNTSRHLSEFWMVEPEIAFARITDCMDVAEEFLAYLLRAALKDCAQDIAFLDERAAQHARSARGDTPLAARSTARTPPVRTPGQLTRMLEDVARAPATRLTYTEAIKLLENSGRSFEFPVRWGCDLQSEHECFLTEEVFHGPVIVYDYPKEIKAFYMKLNADGTTVRSMDLLVPGLGEIMGGSEREEQFEVLCARIRASGFDPHDYRWYTDLRRFGTAPHAGFGLGFERLLQYVTGLGNIRDVIPFPRTPRTADF

SEQ ID NO: 76551 - protein, 259 aa, Treponema pallidum
MPTLLDIRDLCMSIADRPILKSLNLTLNTGEVHAVMGPNGAGKSTLAGTIVGNPHCTIERGEIYFQGQCINDVPVYERARRGIFLSFQTPEEVPGLSVEEFLRAAKEAVLGTKVSVLDFHTQLRAKLARLRISEAYASRGLNVGFSGGEKKKNEILQLAVLEPKLAILDETDSGLDVDATRIVFEGIDDIRTPDMGFLIITHHREVLEYIKPDVVHILVDGTIVKTGDVSLVHYVVEHGYADFATPRAGEQGGTPVSPE

SEQ ID NO: 76552 - protein, 147 aa, Treponema pallidum
MNAEAIYRQVLLEYARKQEHRRVLEGPVGIERGHNPSCGDDLTLLIKREGDRIADVAFLGTGCAVSTASTNILIELIKGASVAQAQKTVALFFHMMAQQCLTDQERAHLQDACILACFASMPARIKCATLSWHNADILLHHKKDTDA

SEQ ID NO: 76553 - protein, 391 aa, Treponema pallidum
MKILHTADLHLGKTLHEVSLFASQKKMLGDLCTLLAQDNYAALIIAGDIYDRCVPSAESVSLFSSFLQNIKRSMPRLPIYLIPGNHDSAQRLSFAQELLKQQGVFIAQDPEESTRPHLLCHEGETVQLFLLPFLHAGAFSYLDEENTTCLIHTQSELLQEASRRLQRAVSLDTPSILVAHLFTQKGISCESERPFVGNAVYADPHWFDFFTYVALGHLHKCQKITERMYYSGSPLPYSFDEANTQKVALSVEIHCNTKGFPIHVTPLPLEPLIPLRTIRDSFHALYTGDRYLLYQRDFLEITLTDPALVHNPIGLLKPRYPGLLSIKQENAFAFDIPPPYSSNEGIAPCTHHSLRTHFDVFMHEVSPTPDDREKGALFQELFDEMQQEFSS

SEQ ID NO: 76554 - protein, 1047 aa, Treponema pallidum
MKPMRLTLHNIGPFVGTHTVDFTALGPIFLVCGKTGSGKTTLFDAIAYALYGKPLGTRAEVIRSLRSHYAAPSEAAFATLEFSLGTKIYRVHRTLTCTLSHRKTEQPEQLYLEQKKGHGWERIACAHKSETECVIHDLLKLNSKEFERVVMLPQGECAQFLKANSKEKKETLMNLFPVDQYTALMERAKKKSLHAKAVLETLRSQLETLCAECMPDTYHERKQTLEAELQHARDALQQTRISHAYYTQKREALEAQLKKQQLCKELRARIETYRAQEPVHAETQKRIDRARKAAPLAAHIKHVTQCEQDAQRIHAEIQEKMRSREQLLMKRAAHVAQQSSIEEQRRLLQTLHSACIHIEDAHDVATSIRDISCQAHTLTQHIHTLAQQKTTLTQQEQSLCKELDILQREAGTIDTRTSAFNDLQIQLAHAKKTQELSQRYAELCAAHATCTAQCEKLEKIHAQKSAYSTRAREQLLQTKEQIHLQETRTHAVVLARLLEHQEPCPVCGSCIHPNPARQDIDNLEPLTRRMQRIEQTYAQLETSEKDVYHILTSERERRASYSAQMQEIQHSFSILTSCDTRSSCDIPNVQKITVRVLDLTEKLSRAKDMLACAQHALLRKKQPEQDLQDVRAHLQQCSQELAKKETALHALQETLTQQRVRIHALSIRLPKELLASNLLAPQKMQHEKESVAYWKEMLAHCQTLMRELHTHIEEYDREFNEIENASSALGADIAAREDALNHVQKEYMHLARTVCCARTEAHFNNNEEVTAALMTDAELSHAAAEIQFFNELRAADTHLLKTLEAEIGTEIPSDLDELNAQCHTLVKDEENFLSRIEILSATLHTLTHQYLKYEECSKQLAQKTQESAKLITLSDELNGINQKKIQFDAWALISFLHEITAYANIRLQKMSEGRYHLRVADSHVNARGYQGLALLVADAYTGSVRPSATLSGGETFMASISLALGLADSIQTRSGGIVLDSLFIDEGFGSLDEASLDKAIGILDEIREGSRMIGIISHVHELRTRIPHKILIKKTNAGSHVMQGDAE

SEQ ID NO: 76555 - protein, 493 aa, Treponema pallidum
MKTSALFLDFYELTMAQGYFFHKPHECAVFEVFFRKHPFAGGYSIFAGLDPLLTAIEQFRFSGEDIDYLRTLHLFHDDFLSYLASFRFSGDIHALEEGSVIFPHEPIIRVHARLVEALLLEGLILNTINFQSLIATKTARMWRASGEGVLMEFGLRRAQGYDGALSATRAAAIGGATGTSNTLAAKLYGIRPMGTMAHAWVMSFDSEEEAFERYAALYGSASVFLIDTYHTLESGIQNAIAIGTRLKAAGKSFGVRLDSGDMQYLSVQVRAALDAAGLPEARIAVSNELDETIIESLVLSGAPIDAWGVGTHLVTGGADSAFTGVYKMSARATTQPAHTQHGHAASQRLPHWDDAHWLPVMKVSDNPAKTTTPGIKQVWRLYDAAGQYKADVIGLADEVIEPQVAQRYIHPFYNLQSFTFAAHQVEPLLRTVMQAGNRLRAGESVQEIHARMRAQLQRLDKSYVRLLNPHVYKVSLTERLAQLKNTLITALRR

SEQ ID NO: 76556 - protein, 337 aa, Treponema pallidum
MLRVLTGDRPTGRLHLGHYAGSLGTRLRIQSEHECFFIIADLHTLTTRHGRAQLAELPALVRELVLDYLACGIDAQRAVIYLQSAVPEVTELAFIFANLVTVPRLQRIPSLKEMAQAANLSELPFGLLGYPVLQAADILLARAHLVPVGKDNESHVELTREVAKRFNRLYGEVFPLPRALLSDCATLVGTDGQAKMSKSLGNAIFLSDDEETVRRKVRAMYTDPARTRADIPGRVEGNPVFAYHDAFNPNTDEVAHFKERYRAGRVGDTEVKDALARALNTFLEPIRARRAQLEQQPAYLARVLEEGCARMRAEARKTMQRVKEAMGLSARPLVHLP

SEQ ID NO: 76557 - protein, 823 aa, Treponema pallidum
MSTAQRRVQELEKLILHHQDRYYNAESDISDDAFDALWEELARLDPGNPLLKAIGSDSQRDAVKKRHIVPMGSQHKAADEESFSAWAKKNALQAFLVQHKLDGVSLELQYERGHFCCALTRGNGIVGDDVTANVRGMRGFVPTLTAEWGPCGNLPFTGGVRGEVIMHKDIHRSHYPTHANCRNTVNGILKRKDGRGRTHLHIVCYDAVPGTPGKPFTGSLPFADETEKLAWLARQGFVTVHSHRCANAQEVVALRSEIMRTRELLPYSIDGLVVKSTDLDFQDAQLPRPKKQIAFKFSTQEAITTLRDVQWQTSGVTYTPIGITDPVRLAGTTVKRANLCNPNMLTKLCLKIGSHVLISKRGEIIPKIEALVSTPAHAQEIHIPTQCTSCNTVLENSGSRLFCPNVNCPLLSHHRITRWIECLEIKHVGTELIQRLFEEKKVRRIPDLYTLTCEDLIEIEHVGNATAKKILEAIHHKKEIALQTFIAGFGIEGIGETMGEKLICAGFDTLEKVLHATTETLESIYQFGTELAKSVVTGIARVKDDMCELLDRGFVRILAKQQAESPLRGKSFCFSGSLRNGDRATIHRIRALGGVVRTSVTRDLSYLIFESLSQPYRTAQKLKKEQGVALEIISEDEFCRLLDQASASCTHTGETVHPLQGKSFYFSGASRSMNHKHAQEKVRALGGDVASSVTAQLDYLVFYSQSTRYRTACALGIQIISEETLHKLIATAQSPLHTDAHVHAPLHGMSFCFSGDLDGMTRAQAIALVQRLGGTVKTAVSTQLTYLVSNDPHGQSRKCQNAVRCGVRIISEHVFLALCTPGT

SEQ ID NO: 76558 - protein, 654 aa, Treponema pallidum
  MISC_FEATURE (79)..(79): X=any amino acid
  MISC_FEATURE (80)..(80): X=any amino acid
MSTVRFCPTAMLPPSGEGLCALDRPSLRCYRARSCELMPEGATMYAGTYSTPPISVLLRELVLSCCWVPLLFLSASAAXXFGDGQFVELLLSPASVLYLLCLFPLLHYRALCAAFIRGEDEARFSKRVNSYGRTALRASVLLSCFVPFVSILARSPFETGPQMAVYVMLSAGGCLLFAPALHFLLTRPLERWAAFLPLRESSVRANWTRMLLTIAIALFVATLLLVSAPLLVRTDSQNITPAELLTMAGTFGLCASAVSCMEFLLCAYLTSREITRLRVLAECIGTGDYTCADVPRETRTSIGLLARSLSSLRDKDRAFFSRFLQLTQSSSAIAHTAETDIAHLEEAARTTKEEIDHVNENVTAQTATISSSKEIVGTMVEGVGRLNASVEAESETVTRSITLVEQMVEKIHSIEKIIESNDARVGRLREETNRAGNLTNRSLELTQNISKSSKALLQASLVIRKIASQTTLLAMNAAIEAAHAGQDGRGFAVVADEIRKLAEESNEQGKIISSVLVQLTEKIEHIAQQAESLSKQFSNLFVLAEEVKQRESTVMHAMEEQSSGGEYIRRSMEAITGNRRRIRGGISLMLKDGELVLKDMNELAHNTGGITVAMHDMAASTSRILDAVTSVKIIASENKNAMDMLTNQLTQLRL

SEQ ID NO: 76559 - protein, 442 aa, Treponema pallidum
MRVGSAVSPKVLKGFRDLLPDEEIERALLVEKLTVALRQMGFVPIDTPALEYTEVLLRKSEGDTEKQMFRFVDKGGRDVALRFDLTVPLARFVATHYARLYFPFKRYHFAKVWRGEKPQMGRYREFTQCDFDIVGSDSVCADFEILKSIRHMLYMAGAEHIRIHVAHRGLFDRFLRALSLSDQAEHILRIIDKRAKMAPHVLTAQLESLCDPVRVQKIMTYVSAGEVDGVAPSFEHTLSAIETLTGGVSEESTRLRKIYELLCAVNIQSSYVFDPSITRGFDYYTGMVCETFLTQLPHIGSVCSGGRYDHLTALYMKDAVSGVGASIGLDRLYAAFQQLGMSREHVCFVQALIFCQDSALMDVYQKLCSYFAVQVATEVFPDPRKLSQQYAFAEKKGIRWGIFVEQRNAVVEDCLLVLRDLSTRKDTRLPAHEVRRRMAAEG

SEQ ID NO: 76560 - protein, 586 aa, Treponema pallidum
MHSSQLFERARLYLEEETDPFFAQQVRDLVAQNNIAELEERFLQTLSFGTAGLRGVVGGGTNRMNPFMIKKITHAIALYLLKTFPEKAARGALRAVIAYDSRVHSRLFAHTAAHVFLAHDITAYLFSDPRPTPELSYAVQYLTCDVGIVVTASHNPPQYNGYKVYWNDGAQIAHPHEKNITEEMNAITSVVNLEEKVPVKRSAPTIIDAEIDEPYCTSIKEKLFRPGLTKETVQSMRIAYTPLHGTGALHVERILGDMGFSIMTVPEQRLPDGNFPTVSSPNPEDPAALVHACAYADRVHAEVLMATDPDADRFACAVRNTRGVLQLLTGNQMGALFTDYILLTLQEQNNMPARPAIVRSVVTSPLSDRIARTYGATCVECLTGFKWICGTAEKISQSGAYSYVYGFEESYGHNFGIQVRDKDGINAAALCAEMGVYWKLRGMSLIDRLHQLFRTHGLFCEKTLNKTYAGVAGVSTMNAIMNTLRRQPLTQIARKRVMKVRDIYLGVEFSPENPAQTSALSFPQSNVLQYFVQDGSIVSIRPSGTEQKIKCYIIHPLTVSTSIEEAEQAGNMFITAVEQEMGTYLQ

SEQ ID NO: 76561 - protein, 426 aa, Treponema pallidum
MLDYRFIRENVDAVKENVKVRNVHADVDAIVHLYDQRVKLLAELQELQRARNENAQTMKSSLDALARSACVETGRALKDRIAHSERLLVQISDQLLSATQALPNMTHMCTPHGRSDSDNLEIKRCGVPPCFSFSPRDHVELARLLDIVDFEAGKKVSGIKFYYLKREGVLLEQALIMFGLQFLQERGFVPFLTPDIAREGMVCGLGFNPRGSGSNIYRIEGEHRCLVATAEITLGAYHAGEVLEERSLPRLYAGLSHCFRKEAGAAGQFSRGLYRVHQFTKLEMFAYCTPSDSECLHERLRSLEEEIFTALEIPFRVVEVCAGDLGAPAYRKWDLEAWMPGRQGGSWGEVTSASNCTDYQARRLNVRYKDAEGKKHYVHMLNGTALAISRVLIALLENGQDAEGRVRIPQALVPFCGFEYLYPRVL

SEQ ID NO: 76562 - protein, 265 aa, Treponema pallidum
MGVIDWLRRRHAVTHIFQQPLNEEKQDMIRGIVDLSDTSVREVMIPRIDVDFLELSMSGETLVEKVTESGHSRFPVYEQTIDNVVGVLYVKDLIKLFGRPQEVRLERLLRKPFFVPESKRIDSLLREFKRRHVHIAIAVDEYGGVSGIACMEDIIEEIVGDIQDEFDHEREDIEPLGQGVWLCDARVDLEDLSECLHTVFPSQEFGTLGGFVFNLFGKIPVKYEKVSWGAFDFIIQDMEAHKINTIKIVSVLRGDSEPACVSERP

SEQ ID NO: 76563 - protein, 348 aa, Treponema pallidum
MKRFCVSSSRILSLLFLSLWMGSCLQTRQDVLYLYNWTYYTPTSLIKKFEQQYNVQVVYDDYASNEDMFAKLSIGASGYDLVVPSGDFVSIMKRKHLLEKIDLSKIPNVQFIKESVRARIAYDPKMEYSVPYYLGAAGIAVNKKAVPSYARTWSIFSRKDLAYRMSMMDDMREVMGAALASLGYNVNTKNEQELAQAAILVTDHWKPNLVKFDSDGYAKSFASGDFVVAHGFAEAFFAETPEAMHEHIDFFIPQDVASPVYVDSFCIPKGARNRDLAHAFINFFLEPAHYAEFLDTFGFPSTIHREAAAYQKKTPYYSEHDLERGTLKTDVGAAIEHYNAHWNAVRFR

SEQ ID NO: 76564 - protein, 73 aa, Treponema pallidum
MLILSRKTNQKIFIGDSIELTIIEIRGDQVKVGVEAPRSVKIFRQEVYEEIQRENRAASDSPWSPNSLPQLPV

SEQ ID NO: 76565 - protein, 332 aa, Treponema pallidum
MTSYKALGLVNTKDLFAKAVKGGYAIPAYNFNNLEQLQAIIQACVETRSPVILQVSSGARKYANATLLRNMARGAVEYAHELGVDIPIVLHLDHGDSLELCIDCIESGFSSVMIDGSALPYDENVALSRKVCEYAHARADYVTVEGELGVLAGVEDDVVAEKSHYTMPDEVEDFVKKTGVDSLAISIGTSHGRAKFTPEQCTRNADGVLIPPPLRFDILAEIEKRIPGFPIVLHGASSVPVEYVREVERYGGNLPDSVGIPEEQLRKAAKSAVCKVNIDSDGRLAMTAAIRRVLTTKVDEFDPRKYLGPARDELKKLYMHKNKEVLGSAGRA

SEQ ID NO: 76566 - protein, 1170 aa, Treponema pallidum
MARMSFVHLHVHSNYSLLDGASSLQRLVRTAKSLGQEALALTDHGNMFGALHFQKVCSAEGIKAIIGCELYVAPESRFDRSEHTIGRRYYHLIVLAKNETGYRNLMVLSSKAYIEGMYYKPRVDDELLAQHAEGLICLSSCLAGQLPYLLLQGRKREAEEHARKYRALFGVDNYFIEVQDHGLDEEKKVAPLLIELACRLGIPLVVTNDVHYAEQEDSVAQDILLCIGTKKNRSDPNRLKFKTDEFYLKSSEKMAQLFPHYPEMVLNTVRIAQRCNVRIPQPGPLLPLYQIPHEFSSKEHYIRHLVHRGLYDRYAVVSEEIKARADYELDVIVRMDFVGYFLIVWDFITWAKEHDIPVGPGRGSGASSIVAYALKITDIDPLRYKLLFERFMNPERISMPDFDIDFCFERRQEVIEYVRARYGNDNVGQIITFGTLKPKAAIRDVGRVLDIPLSEVLMITKLMPDDPKLTFKKAYESEQLAQMKQEPRYAELFQIAEKLEDTNRNTSLHAAGIVIGKTALTDYVPLYKDSKTGKISTQFGMDLIEDCGLVKMDFLGLKTLTLIQRTQNLVRRKGGKYTTFSISDISDQDPTTFSMLAEGKSAAVFQFESRGMQGILKRAKPSKMEDLIALNALYRPGPMAFIDQYIESKRDPGKIKYPDPCLEDILSETYGVIVYQEQVMQVAQRIAGFSLGEADILRRAMGKKKLAVMQEKKKEFAERAEKQGFDKKHAENIFEILIPFAGYGFNKSHATAYSVVAYQTAFLKANFPAEFMAANLSNEINSAEKLPLYMAEAEKMGLSIQKPDVNASEPYFSVCEGCIVYGLLGIKGLGEQVAFDVFDERIRNGPYTSFVEVLDRVPATSLNKKNAEIMIKAGCFDRFGVTRASLTAHLDDAMKYVARKKAVTSSRQASLFDETDLGECSEYTFPVMEEWSQRERLRIEKELMGYYISGHPLDEYRSVIGEKATLDLGHIENARSENKYLIVGVLNAIHPYTTKSGKNMAFGSFEDLHGSVDIVVFPVLWEEHRAQFLPETIMGLVGTVDFSKETPAFLVDSVIDLEQLRFAQVKTILAGSEHRRVSSGEKTPLQKRGVSQEVHIEVSSHVRAHAQFKSLYEILSAHTGGSGEVFLHMHVDDRTYVVYVPSCKVSATEVFAQQLKGNESFVQILKECVQ

SEQ ID NO: 76567 - protein, 396 aa, Treponema pallidum
MVHVTLLYGGRSAEHDVSVRSARFVARTLCLQHTVMLIGITRRGVWYAQPACALEQLCTGTVALSIQEDEKRRVCLVPGGGTAGAFVIAGMPCVTDVVFPVLHGSYGEDGTVQGLLEMLQVPYVGCGVCASALAMDKVKAKMLWQAAGLPVLPFVFFRKDAWRMHMQEFVAQLETRLGYPLFVKPAQAGSSVGASAVQTRAPLIPAIEAAFQWDEVVLVERYVRAREIECALSGNGPYTVHGAGEVIAQGAFYDYEEKYADASVARVLVTAPLETAQYEQITTLALRAYEALGLTGLARVDFFLLETGEVYVNEVNTMPGFTSISLFPQICQAAGVAPQDLMAQLLSCARERFAARAALSTDLHAHVCAPSVTAAHDPDAQGDDWDQRDSNPLPTA

SEQ ID NO: 76568 - protein, 462 aa, Treponema pallidum
MEKIVGLCKRRGFVFPSSEIYGGQGGVWDYGPMGIALKNNIAHAWWQDMTRLHDHIVGLDAAILMHPNVWRTSGHVDHFSDPLVDCTVCKSRFRADQVAVPSAGGPCPQCGGALTGVRNFNLMFSTHMGPTDERASLLYLRPETAQGIYVNYKNVLQTTRLKVPFGIAQIGKAFRNEIVTKNFIFRTCEFEQMEMQFFVRPAEDTHWFEYWCAQRWAFYQKYGVRMNHMRWRTHAAHELAHYARAACDIEYAFPMGFRELEGVHNRGDFDLTRHAQHSGKDLCYVDPDPNLDAAARRYVPCVVETSAGLTRCVLMFLCDAYTEEYVQAPNVAFSETTQTADQEGAARTGEMRIVLRLHPALSPTTVAFLPLVKKDGLVDLARAVRDELREDFACDFDAAGAIGKRYRRQDEVGTPFCVTVDYQSKEDDTVTVRLRDSMAQRRVSRAFLAEFLRTEIKHYRRP

SEQ ID NO: 76569 - protein, 537 aa, Treponema pallidum
MEVRVRYAPSPTGLQHIGGIRTALFNFLFARAHAGVFVLRVEDTDRSRCTAAFEQNLYDTLRWLGVSWDEGGGCPETAVKQGARGDGRSVAHAGGAYGPYTQSARTDLYRAQVARLVETGQAYYCFCDASRLERVRKIRTLNRMPPGYDRHCRELLPEEVRECLASGVPHVIRFKVPLEGSTHFRDALLGDIEWQNEEINPDPILLKSDGFPTYHLANVVDDHAMRITHVLRAQEWVPSTPLHLLLYRAFGWQPPLFCHLPMVMGADGHKLSKRHGATSCDEFRNAGYLPEALLNYVAMLGCSYGEGQDLFTREQLCAHFSLSRLNKSPAVFDYKKLAWFNGQYIRAKSDEQLCALVWPFIANAGVCGHIPADVEAGAVRTRRFADEAPCAPTEAQRSMLMRVIPLIKERLRFLTDAPELVRCFFQEPSLPEQGVFVPKRLDVAQVRAVLVRARGLVHEIVSASEPDVEVLLRAEAEKFGIKLGDFLMPIRVALTGATVSAPLVGTIRILGASRSCARIEHVIRERFSDDSQGVGGG

SEQ ID NO: 76570 - protein, 352 aa, Treponema pallidum
MNVLGIETSCDETAVAIVKDGTHVCSNVVATQIPFHAPYRGIVPELASRKHIEWILPTVKEALARAQLTLADIDGIAVTHAPGLTGSLLVGLTFAKTLAWSMHLPFIAVNHLHAHFCAAHVEHDLAYPYVGLLASGGHALVCVVHDFDQVEALGATIDDAPGEAFDKVAAFYGFGYPGGKVIETLAEQGDARAARFPLPHFHGKGHRYDVSYSGLKTAVIHQLDHFWNKEYERTAQNIAAAFQACAINILLRPLARALQDTGLPTAVVCGGVAANSLLRKSVADWKHARCVFPSREYCTDNAVMVAALGYRYLIRGDRSFYGVTERSRIAHFSKRGGDRLAAQRSAASQPLF

SEQ ID NO: 76571 - protein, 357 aa, Treponema pallidum
MSRTRARVCLPVKADAYGHGACDVAQAALSCGVHSFAVACVQEASQLRAAGVRAPILCLSTPTAEEISSLIEHRVHTVISERAHIALIARALRQSADTGATCGVHVKIDTGMGRIGCAPDEACALVQMVCATPGLHLEGVCTHFSVADSVRAEDLQYTEMQRAHFMHCVQYIRKSGISIPLVHAANSAALLCHPRAHFDMVRPGLLAYGYAPESVHPAVRSVFLPVMELVTQVRAIKKIPAGAYVSYQRLWRAHTETHVGILPIGYADGVMRALSPGLQVCIGGKWYPVVGAICMDQCVVDLGTPLRVTVGDRVTLFGPQDAGGPGQGADVLASHAGTIPYELLCAIGKRVERVYIR

SEQ ID NO: 76572 - protein, 364 aa, Treponema pallidum
MKRALAQRLRNIERALADALPAQPTRSWMGTRLRVLASEDTRVLRTVCNACVSCGGKRWRPLLLILSAELAHACVQCTHRKLQGHKRKKISEREWYTLSAVVELIHTASLLHDDIEDHSSTRRGKPCAYLRYGTDCVLNAASWLYFHAHALIDTLSIEPALKAALFSATISATRALHMGQALDIAWHRSPELIPSRAQYLRMVALKTGALIALSGELGFLCAGYSAREARSFGAQVMPIGIGFQILDDVQGIDGGVSGKAHADDIVEGKKSFPVILHVHTHPQDAPTFARLFAAARAEGLHSPAVKQAQRILYSSEALTHARAYGLRMIERTLTRVHAHFPCNPACQLWCTAVQYGVRAHLHAH

SEQ ID NO: 76573 - protein, 496 aa, Treponema pallidum
MCDVLTIRDLSKSFARNRVLNGVNFRMGKGAVVGLMGENGAGKSTLMKCLFGMYAKDTGQILVDGSPVDFQSPKEALENGVAMVHQELNQCLDRTVMDNLFLGRYPARFGIVDEKRMFDDSLTLFASLKMDVNPRAVMRSMSVSQRQMVEIAKAMSYNAKIIVLDEPTSSLTEREIVRLFAIIRDLSKKGVAFIYISHKMDEIFQICSEVIVLRDGVLTLSQSIGEVEMSDLITAMVGRTLDKRFPDADNTVGDDYLEIRGLSTRYAPQLRDISLSVKRGEIFGLYGLVGAGRSELLEAIFGLRTIADGEISLAGKKIRLKSSRDAMKLNFAFVPEERKLNGMFAKGSIEYNTTIANLPAYKRYGLLSKKKLQEAAEREIKAMRVKCVSPSELISALSGGNQQKVIIGKWLERDPDVLLLDEPTRGIDVGAKYEIYQLIIRMAREGKTIIVVSSEMPEILGITNRIAVMSNYRLAGIVDTKSTDQEALLRLSARYL

SEQ ID NO: 76574 - protein, 460 aa, Treponema pallidum
MKGQDVILCDGGRHFSYKVLPRVVIVGRPNVGKSTLFNRLLGRRRSITSNTSGVTRDSIEETVILRGFPLRLVDTSGFTVFSEKKASRQHIDTLVLEQTYKSIQCADKILLVLDGTCESAEDEEVIQYLRPYWGKLIAAVNKTEGGEEVHYNYARYGFSTLICVSAEHGRNIDALERAIIQNLFSVDERRELPKDDVVRLAIVGKPNTGKSTLMNYLMRRTVSLVCDRAGTTRDVVTGHVEFKQYKFIIADTAGIRKRQKVYESIEYYSVIRAISILNAVDIVLYIVDARDGFSEQDKKIVSQISKRNLGVIFLLNKWDLLEGSTSLIAKKKRDVRTAFGKMNFVPVVPVSAKTGHGISDALHCVCKIFAQLNTKVETSALNTALKDWVTSYPPPRKYGHVSLKYLVQVSVRPIEFLLFANRPDRIPENYVRFLQNRIREDLGLDSIPVKLTIRKNCRKR

SEQ ID NO: 76575 - protein, 407 aa, Treponema pallidum
  MISC_FEATURE (375)..(375): X=any amino acid
MSKALKGDVPVSSSFEEKMKALEAARLQIEKQFGQGSLMKLGKDDAVQGVEVIPTGNILLDEALGIGGYPRGRIIEIFGPESSGKTTLALHAVAEAQKRGGIAAFIDAEHALDPQYAKDLGVSVGDLWISQPDTGEQALEIAESLVRSGAVDIIVVDSVAALTPQAEIQGDMGDAHVGLIARLMSQALRKLTSIINKSKCTLIFINQLRMKIGIMFGNPETTTGGIALKFYSSVRIEVRKVETLSRGDEEAWGNKVRIRIVKNKMAPPFRKVETEILFGKGFSAFSCLLDAAVKQEIIEKKGAWYAYREEKIGQGRDNAVGFLQQNMDITLEIERAVRTKLFPKQAFISSFQEHRPALSLEASPEESDAKTLRRXASRGAGASSSRVQEGSAANDHFQDESTTAKLL

SEQ ID NO: 76576 - protein, 225 aa, Treponema pallidum
MNAKQNARRIASARLRAFRASPTAPAYPAHSLFTAQTAYQRARTVFFYAPLPLEIDPYALAYTAENAGKHVALPRVSGNDLHFHAVTYACTTRPSVSCFTTLCPRTRGIREPDAHSPRLYPPHPSPNTPAQRTLALPLLIVVPALAFSTNGARLGRGGGHYDRFLARIAATIPAGSYYTLGLCFDCQIMAVIPQEAHDQSVHAVLTETRLISCATARAPAPPFSL

SEQ ID NO: 76577 - protein, 706 aa, Treponema pallidum
MKRWRAKALDEGRVRELTARYSCSALEAAILVRRKVVDADALLFHFERDLRYLPGPFRFHAMSAAVDRLRLAHERKEKVLIFGDRDADGISATTLLFEALCAFGLTVCWRVPVADEPYGLSCNAVDEHAAAGGTLIVTVDCGISNRAEIAYARHRGIDVLVIDHHAAPETLPDAIIINAKVPGAGYPHEFLSGCATAWKVVTALRFSTSGWYQRPVVLLHVRPVTGAYTIEAVKMCNMEVVDRLSETVVPRMLLPSHTRLGAFLEGQEVFVWDEQVVRTQLAKVFGGEFPWRFTDVRPRMAAFFPQCERASLLRMKDFSRIGRARSKPMEEIESFINLFITFVQKDTQLYRGAADELQLVAISTLSDLMVLAGENRIMVRYGLQAMNEAPRVGLRELFAIQRLMGKKLGTVEVGWSIVPLINATGRLGCPHRAVELFLMREASQRALQARKMVQLNEQRKKLGRSARALVEPLARASLETYSNRLAVVCSDKIHRGVTGILANCLSEALRVPCVIICIMADGHAVGSLRSARGYHLFSLLDPLADLFSDYGGHAFAAGFSIPSERIPQLLHRMELYAATIEFADESAQECGEFDAELDATQMTRGLLTLVDRFEPYGEGNPPLCFLAKRLKIFSASLFGRTERVHVKLTLDAQVHKWPAIYWGAGEKLAQEFAVGDVVDAVFQVTRNTFQGTCTPQLVIQDLWRSE

SEQ ID NO: 76578 - protein, 884 aa, Treponema pallidum
MRRVCYLYLVLLCGLLVGGAALFGFLLASIENIKQSERFTRFNPALPTRILDIRGDLITEFSSDEKREIVSFADLSSHLVHALLTREDRSFYTHHGYSIKAIFRALVGTLTGRALGGGSTLTQQIAGLLYSDRSDRSLRRKIKELWWALHMERRYSKNEIMELYLNRVYFGGGTYGVGAAARFYFGHSVRQMSAAEAALLVILLSNPAHYNPFEYPNRAQDRQRYVLHEMTRLGYLSEQERDESYEHYWAHFDYTRTTSSAFYARADKARWFSEYVRRQLDRMMYGTMNLYQDGYTVHTTCDLRHQLVAEQQVEQTLEQANAHVQKSSLTHVARRELYSNISELLGLVFNVPQLHVGDRRMKAKSGAYYRSTLSPLVNVMALMFGLDNLKTLSDKGASLVRDEIARKRVEGALIALENDTGYITALVGGSRFGASNQVIRATQGLLQPGSVFKPLVYSAALDSKKLTMATQLHDAPQVFSRNGVSYIPNNYGGKWQGVVLAWKALAQSLNIPAIRVLDMVGFDAVIQRAATLLHITDRQEIERTFPRVYPLALGVVALRPIQLARAFAAFGNGGKAVEPIAVRSVEDRLGRVILDPEREVRARLRAQGAATQLISAENAALMTNMLEKTVTMGTLAVASERGRAFTYQDPATGRSFVMPVAGKTGTTQNWSDAWAVGYSPYYTAVLWFGFDKGDRSLGLHSTGATLAGPPWARFMRAIHQDKPHRAFVRPETGLMYQAVCAKSGLLPTPYCGDELVSLSFLPGTVPERFCSYHESGKMLEELAKERLKESGYSTGFWPAVSEEGLHIDPRVFEDPPLGSPGVQGEVLVPSNPFAPVHPQEAPLFDAPHVPVPSASDPSRDAPEEESEDVQDDPARGVQSLDTGP

SEQ ID NO: 76579 - protein, 308 aa, Treponema pallidum
MVRAAVCSCLCVCVAHPAVCGPYPLIAQLQGQDALFRQYSDDVRAARVALAQGKRGNDLPLRFYAYRVKKADTIIRIAARCGIPYDAVASLNRIETLHTPLEGRTLLLPTVPGLYVSADPHLPLERLIYALIKKGQGPSFFLSLPGTAQTTHTREKREVVCAPQALFDGTVRAFFLKPFYRFPLASGRLTSGFGARKSPFTGRLSYHPGIDLAAPMGALVYACASGQVATIAYNRLYGKYVILQHTDGRHSLYGHLSAVRVRVQQKLSVGAVIGNVGSTGASTGPHLHFEVREAGVPQNPERFMEKFR

SEQ ID NO: 76580 - protein, 376 aa, Treponema pallidum
MIEQEGTFPLPLFIIDLQWFAAEDEGRSEDPTETKLRKAREEGRVPKSQDLNGAFVMLFTSTSLFLLAPFILRECIGVLRFFFTRATTASIQNTGWFFVFVRYFMKLALPISFVALVSGVAANIVQNKTVLFSVKSIRPQFKKISPDVIRFFKRSFFSTEGLFNLLKSLIKITAIFFVSYFTIRNDLFMFVSLLGVSLTQSIFYITSLAGKVLLEVSLLLVVFSLPDYFFQRRQFIDSLKMSRQEVKEELKEQEGDPLVRSYVRKQMQSLVRESARNTTDADVVITNPTHFAVAVQYEPAYMTAPTVVAKGSDGTAYRIKRLAKEAGILIEENKPLARALYTQVAIGREVPYEYFNALVLIFTKLDKFKTHAQRKR

SEQ ID NO: 76581 - protein, 153 aa, Treponema pallidum
MVQNTNMRFEMTAAERTRLEMDVRVINKQLEAGARSAKRELGKDDFLHLLIAQLTHQDPTAPMQDTQFIAQMAQFSSLEQMANMSAQVEKLGTLFGNTEALQAVGKMVEVTEADNTVRGLISAVTRADKPQVRVGSHWYEWEHVKVIADPSAS

SEQ ID NO: 76582 - protein, 547 aa, Treponema pallidum
MELRGLLARAIGIGVAESAPAAQETISVGTSCAAAPCSFAQSLHDHMRGAAPQRVSLSPASAAVHERVREEADEQQTGSGTQQDVFTEESLSDVFLVAYETGLRAAQEAASGVRPFDYVRAAQEASGGASWPSAPEFLVVERQATSVTPRSVVPEQPSSGERGRAARPAGLSRAYAQRVPETAPHVQDLCGQESGEHLRESAGARGLRGGSLPSGAAPALLREQGSEATYAASSESEVFDVIFDAEVRQRLVAAAIRGEPVLQSGGAGSSFGGKAGASHASAAAGVSAGAAFQGATAYGQIRHGDSPQELGSFSDARFTVLDARRHSRGAGSGVSSHAGAVLPAAQAQLSAADVDAGAEEHGTESLREGERAGVERAFEGVAHAREETAQSQGIRGFATTQAALSAHIRAHSAELAQSGRVVLRDHGRGYIDIALKPEHLGAVSIRLALSENKRVVGTIHVASQEAFEAFQENLGDLARAFEANGFDAAQFDVQWFGAGAHAEDGHLASQTAAYAAAQRLGGAGVEPVVQEVHWHAQGAALTIDVFA

SEQ ID NO: 76583 - protein, 518 aa, Treponema pallidum
MTSVQNVVSDAKTCDVPVESEPEARTYRPHALLQEEACQRLAQLQGKELKMKDRTQIPLQRMRMLPPKKRSLLMQEAALGFTEQQALVESQRCLNCKTKPCVKGCPVGVPIPEFIACVQRGAFKEAVDIIKTTSLLPAICGRVCPHERQCQLQCTVGKMFKDVSKAVSIGALERFVADWERQHGQITVPYCAPSTHKKVAVIGSGPAGLAVASDTARAGHSVTVFEALHKPGGVVTYGIPEFRLPKEVVVTEIETLKKMGVTFRMNFLVGRTATLEQLFSQYGFDAVFIGTGAGLPRFMNIEGEELCGVFAANDYLTRATLMKAYDTAHADTPVYAAKSVVVVGGGNVAVDSSRTALRLGAEQVHCLYRKTRADMTACVEEIAQAEDEGVTFHFLCQTTRILGDEEGNVRAVVFRDCQEQIDAGERVFLPCGDAECKLAADAVIVAVGNGSNPLMAKTTRSLAVSERGTIVVDEDQRTSIPGVWAGGDIVLGAATVIRAMGQGRRAAASINAYLAQKA

SEQ ID NO: 76584 - protein, 280 aa, Treponema pallidum
  MISC_FEATURE (177)..(177): X=any amino acid
MFSILEKKQFSPQVFYLKVHAPDIAKNRAAGQFVLVQLDDEYAERIPLTIADAHADEGWIALVIQTVGATTMRLCEKEVGDSISVVLGPLGNPTLIENVGTVACVAGGVGAAPLYPIAQAHKRAGNHVIVILGARNRDLIIFEEEMRALADELVIVTDDGSYGRKGLVTEPLRELCXRASCPQEVVAIGPPIMMKFCAETTRPFGIRTVVSLNTIMIDGTGMCGGCRVNVGSEIKFVCVDGPEFDGHQVDFESMMRRMRAFQAREAHDVHCCKMKHHAGR

SEQ ID NO: 76585 - protein, 398 aa, Treponema pallidum
MKVLDMGRHGLFLLLIFFMLVITVFAVFFGMKRDPLESSLSSDNILKVLFVIEHENVPISSNVVAYYPATRRAAMFDIPHNMGLILQSLGRTDGIGSLYSERGIEEYKREVEKLTGINVPFSVVCSLDNFSKLTDLLSGLSVFIPTPIDVHTERAGHVLLPSGSVSLDGDKMRDYLLYEDEDEGEGESASRKQKAILALLRSVNDHSEFFVHSTRAFSLNRLIRSNVRRADLKKLIGELSKLDSERLVPQRFSGTKRVVDGKVLLFPSRDGQQIKEIVRQTLAVLASENGTAFERVYALEILNGTESHGLARTTANIYQGFGYDVVRVDNALEQSVQKTVLVDRIGNPAVAKVVAQVIRCQNIETTSASLDEYGVETGIDFTLILGKDFNGYLVKEGT

SEQ ID NO: 76586 - protein, 188 aa, Treponema pallidum
MDAYARAVLSPPRYEHSRRVAEFGCMLVRRYALEAQLEPHVYCAGIAHDMCREHSEVFLLRAAACDGFPIDVTERGTPLLLHGRAAACVLAQEFGVQDEVLLSAVRWHTFGCEDFGVLGKILFISDKIEPARAWAASLRGAVSTLTLDALAAKVVSASIVCAERKRTTPHPRTCAMLRALGKDVSQPA

SEQ ID NO: 76587 - protein, 376 aa, Treponema pallidum
MASFVDEVLIRVSSGRGGNGCVAFRREKYVPRGGPAGGDGGRGGDVVFQVRRNMRTLVHLRYGRVFRAKNGQDGEGARRFGAKGHDCVIPLPPGCLLRDAQTHEVLHDFGHAHEGCVTLLSGGRGGWGNYHFRGPVQQAPQRAHSGQPGQERVVHVELRIVADVGFVGLPNAGKSSLLNFFTHARSRVAPYPFTTRIPYLGVLRTGDGRDVILADVPGILERASQGVGLGLRFLKHLTRCAGLAFLIDLADERALHTYDLLCKELYAFSPVFETKARVLVGTKLDLPNARECLQQLRAQHPSTEVCGVSVHNRWGLDELQEAFVRLSDAGAGALRSPVWRNQAPSFMYAQLEDPVCQVRDDFGATVSLSRKRKVRG

SEQ ID NO: 76588 - protein, 87 aa, Treponema pallidum
MARKRGGSGSKNGRDSNPKYLGVKLFGGQHARAGSILVRQRGTRIHPGENVGRGKDDTLFALAPGVVTYLQRKGRRLVSVCVENRPS

SEQ ID NO: 76589 - protein, 108 aa, Treponema pallidum
MLLEVGDRGQFLSAVASGHAARGTRGGDVVCAAVSVLLRTAVLGLERLGPQIEAADRGFLSFRVGGCPDSALALLCFTAEFLERGLRTLMQEYPSSVHLCVRRGVVCA

SEQ ID NO: 76590 - protein, 105 aa, Treponema pallidum
MYALIEYKGKQYKVERGSSIVVDNISEVAPGGCIDVREVLMIGGEGLTRIGSPYLEGVGVRAVVGECFRSRKITVYKYKSKKDYHRTIGHRQWYTRLTVSDILGV

SEQ ID NO: 76591 - protein, 901 aa, Treponema pallidum
MNIAKSIHFLSNKEALDKRLDRGLLGIRGRQADELSSLGLPVLPSVVIDATVSRSLYGEKLRSALSPYLRKFTLLNRKEYADAKNPMLLKVVLSPNLAISNYPVLHNFGLTRDTFAGFAERVGEHFATHEVFFLLKGVFGVLLGIAESEENTKGASEFVETLKEIEVFLQGGKSSPSGREAMNRYRALLPDGFFDDAYVQLEEAVRLVSKLLSFEEDGEDGVAILIQPMVYGNYGGGSYSGRFFSRNIITGEKKLQGQYFEERFDECDAEGSDVNAIKPAYLKQLQDIAWKLEDHSREIREVRFTIEAGSLWLIEQKPVEAKSTISLVRLLLDLYEREVVDAEYVVKSVKPGQLNEILHPVIDMTSVTGLKSSQGGIIGVPGAAVGRVYFTADSLIEAWRVAKMGGQDTRCILCMPATYAGDVKAIEVATGVLSNEGGYSAHASVVARQYGKISLVRPDMKIYSDKAVVDGMTINEGDFVTLNVPYYGESTLYMGAAQLIEPDPETSGLVSFIELAKGFVRSFHVRANADSPHDAELALAFGAQGIGLCRTEHMFFKEDRINVFRRMIFSENAEERTGSLKQLQKMQGEDFYGIFKVMQGHEVTIRLLDAPLHEFLPHGESEVSKFLEYLEKVCGKGLSREELQERISMLSEVNPMLGHRGCRIAISYPEIYAMQVRAVFEAVYRLQKEKISVYPEIMIPIVMNCRELKQIVYGKKIEGHAYQGIGSIEEEVRLALKAKEVDYKVGAMIELPAAALSADEIARYAQFFSFGTNDLTQTTLGLSRDDFNTFMPDYTMYDLVDGNPFAILDARVRELIEVAMQRGRLARPDIQLGLCGEHGSRSENIRFCMEVGLDYVSCSSYSVPIALLAIAQAEIENAEKEGRKPAWRGRSSAKSGGRRAR

SEQ ID NO: 76592 - protein, 69 aa, Treponema pallidum
MAHITVDDSENLEKAIKRFKRQVEKEGIIREWKKKEFYEKPSTLLNRKKKALRRKLMKKGRKVSDSRLY

SEQ ID NO: 76593 - protein, 652 aa, Treponema pallidum
MSAPTSFRVHPWDASLPCTGVHPSWEEARPAVNITRSRVAVFISSLTAVLLLLTVQCARYMLMRGNETKELNTLTERGAILDRNGRFLAVGTTVYNLSVNKNLVSDPRTAAHVLAQVLDLSEQDIEEKFRTARAHFFYLKKKMSETEKNLVAHALKEHSLKGFRLEAVRNRIYPESSLASTVIGYVGDDGRGLSGIEYTLQDVLSPAPYHTGYTGKGHTVTLSIDRTIQYMMEKIADTTLRRTQAEGLMFLAVEAKTGQILSYVSKPSANLSHFSQSTPAERFDRPALFIYEPGSVFKIFSIAALLELGVTYTHDTLHCDGSFSFTSPFLKPGQKGHLIRCLRPHGTISAEDIIRLSCNDGMAQIAERADNHSFEQLLRAFGFGAKTEIELPGETVGLFSPSERWSHRSKHTIAIGQEIGVSALQVVAAATALANEGVPLGLSLLHEVTTAEGTVVYRHKKKPKTRVISAVNAQKVLRYMRTAAELGTGKKALVDGVPIAVKTGTAQMAHRNGRGYSDTDYLASCIGLFPAHDPEIILYIAIIRPIGQAYGELIAAPVISQAANEIIDYRGMVRANAPLIQHSGLIHTSERTPPRLGTHMPDLTGQPKRLLLDIAKRTDVHLVLTGEGYVYEQHPPAGTPLTKGMTIELKLK

SEQ ID NO: 76594 - protein, 609 aa, Treponema pallidum
MRIIPFSEFKDRIASGEIVKVVVGSPYFVGYTSARPAPSARGFSLLSEREAPTYHAIGVLSDSFLSMLDERQVVYSIKPRERNYLIETFQYLFPLLILFFVWRFFFKRMASNVSGLGSSIFSAGHARSAAVEEGKVTTRFADVAGVDEAKEELMEVVDFLKFPKKYTEIGGKIPRGVLLVGPPGTGKTLLARAVAGEASVPFFRISGSDFIEMFVGIGASRVRDLFKQAREKAPGIIFIDELDAIGKSRLNAIHSNDEREQTLNQLLVEMDGFDNTTGLILLAATNRPDVLDPALLRPGRFDRQVCVDRPDLKGREAILRIHAQNVKLAPEVDLKAVARITGGYSGADLANVVNEAALLAVRSGRAQVIETDLDEAVEKTMIGLQKKSRVIREEERRIIAYHETGHALAGTFTKGADKVHKITIIPRGTSALGYTFHIPEDDRHIVTEQQLLAEVDVLLSGRAAEFVAFGEVSTGAGNDISRATDIVRKMITDYGMSEKFQNVALTRRGTGYLAEPQLAREYSECTQQYVDEEVARVLAERYRAVVALLTEKKELLEYIATRLLERETIERDEFEEVIRCEHDLEGLKKRLSQQQEGASAPAQGQSPPS

SEQ ID NO: 76595 - protein, 695 aa, Treponema pallidum
MSRGISTFRNIGISAHIDSGKTTLSERILFYCDRIHAIHEVRGKDGVGATMDNMELERERGITIQSASTQVQWKGHTINVIDTPGHVDFTIEVERSLRVLDGAVLVLCSVAGVQSQSITVDRQLRRYHVPRISFINKCDRTGANPFKVCAQLREKLSLNAHLMQLPIGLEDRLEGVIDLISLKALYFEGESGAHVREAPIPEQYQADVKKYRDELIDAASLFSDELAEAYLEGTETDQLIRAAVRAGTIAEKFVPVFCGSAYKNKGIQPLLDAITYYLPDPTEVTNTALDLDRAEEPVTLSTDADAPVVALGFKLEDGKYGQLTYVRVYQGTIKKGAELFNVRARKKFKVGRLVRMNSNQMEDISEGTPGDIVALFGVDCASGDTFCSGDLNYAMTSMFVPEPVISLSITPKDKRSADQVSKALNRFTKEDPTFRSFVDPESNQTIIQGMGELHLDVYIERMRREYKCEVETGMPQVAYREAISARADFNYTHKKQTGGSGQFGRVAGFIEPIAGQDYEFVDQIKGGVIPNEFIPSCDKGFRTAVKKGTLIGFPIVGVRVTINDGQSHPVDSSDMAFQAAAIGAFREAYNGAKPVVLEPIMRVSVEGPQEFQGSVFGLINQRRGVVVSSADDEQFSRVDAEVPLSEMFGFSTVLRSSTQGKAEYSMEFAKYGKAPQGVTDSLIKEYQEKRKAEQR

SEQ ID NO: 76596 - protein, 649 aa, Treponema pallidum
MQGAWLGAHRERAPRALERYGVQRSLCVFVSTRKFHFLLHFPSMDVSFEELGLNEQSLAAVRLKGFRCPTPIQAAAIPRLLAGDANIIAKARTGTGKTAAFGLPLIQELGSPCEHPGALVLVPTRELAAQVASELSSLRIQKIPRIHTVYGGVSIAEQLRNLEQGGEIIVGTTGRVIDHIERGSLELSYLRYFILDEADEMLNMGFVEDIESIFSHANKDARVLMFSATMPRQILSIASTFMGSYEVVEEVTPEEARPLIEQFMWVVRDADKIEALVRLIDVSDNFYGLVFCQTKADADTVAKSLDERHYHVAALHGDIPQSQREKILERFRTKRARILVATDVAARGIDIEGITHVVNYSIPHDSATYTHRVGRTGRAGSQGIAISFVRPHETRRMEYLSKHCNGELKASTVPLVEHILTQKEGRIFSSLKTHLCQLLSEGVHGTFTRFAQRLLQEDLKARVAEALGTSADVPQEPNVSLVAALLQIHYGTALDPRQYRDIKTITPETARARPHDAEKAYVRIEYGKKSYLTRKRVVQFICALVKIPGHLVDRVDITERCAFARIPRRAAEEAVRLSKKRKDLPRVSFVGHASRLRNTATPAEKSTYPRRLPSGEGLREQISRRTSSSKKASGKPEDSLPPPQEHRLD

SEQ ID NO: 76597 - protein, 593 aa, Treponema pallidum
MSRRDYLRKERLTNKHTSVRRSVPLRTIDTYPLFLLWWAPMHLVAVLLQGIGSLGFMLFGMKLMSDGIQKGTGESLHKILQVMTSNCFFAVLTGMAVTAIVQSSGATTVMTISFINAGVLSLTQSIGVILGANIGTTVTAWIVALVGFQFKLASIAVPAFGIGYFLTFFKHLHKGHLGESIMGFGLLFTGLGLLSSLIPPLSVEELSFLKIAVEDRALSVFVGLLSGFVLTVILHSSSATTAIVLTMAFGGVIGVEFAAASVLGSNVGSTIDAAIAAIGSKLNARRAAAVHVLFNVFGALVFLMFFHPVLALLCVLTPKNSGFDNITVRLALFHSMFNIVNTIIVFPFTKHLAAFVEWLIRPRYDDAPERYQLVFQETAVKESAEAHIFRAEIELKKMFSIAQGMLVTIRKSIQGTCMLSTDEIVTRLTKEEDYADQMQEQLSRFLIKTSHLSLSEKAKHNVQLMFSIADDIENITDHLCGIGLYFHKSIKGNVPLKRDDIEELVPYVGMVDECVDFVYSHLNRPLEDKQVLHVNQMTHSIESKGAHLKGLVRRRLEQGADVKAELLYMDIVRGIEAVGNYALSISRWLARML

SEQ ID NO: 76598 - protein, 303 aa, Treponema pallidum
MMSTCAQAFYRLYEIIVRLRAPDGCAWDLAQTPVSMCSSFLEETYEALEAILEEGEAQHSSYAHVQEELGDVLMNVCMIAYMYEQRGVFSLADVVTALTEKLIRRHPHVFGQTEGFPGPENPKRAQTAQEVFDQWERIKTQVERRRAASPLEGIPRTVPPLMRASKMQKNASRARLFCPTRTEVVRECARTFRALRAMSENSAEQSATQAAHVAVGALLTAVISFAHLVGVDPVLALIRANADFVRRFSCACSIPAISGGTSVFLSRACHKPRRARTRASAVRRRARSRRLFFTRHKLGNMLR

SEQ ID NO: 76599 - protein, 679 aa, Treponema pallidum
  MISC_FEATURE (612)..(612): X=any amino acid
MRGCGVDRTGGYVRLALAAPAVRVADCAYNTQRMIQTVRRAASCGVDILLFPRLSLTGCSCASLFAQDTLLSAVCTHVSALCAGTADCQLLALVSVPCFLRTQVRVCTALVARGRVLALVVQDTLAACGAQKMQVPCEVLYGGAPVPVYDVQTCFESAEGLFSFCVGAMDGSVPATLVLQAYGTPSTAQTPDIFAAHAAAYSAQHQCAYAYVNAGWGESSADAVYGAESGIFECGQCVVQDSLQEMRERGERPAHAVRGLHVSADVDVSLVHFRRRARSGHTTLGASAPCVTLPAGIFAASKAHATLRRPRVPCPFFPPAFQKSQDAVPPLTGAVCLAVSAPSDTQDGFLQRTIDLAAQGVALRLEHMGCRRLVVGVSGGVDSACALLICARALDFLSIARTQLYALTLPGFGTTSGTKGAAQEFARALGCTVQEISISAAVTHHLHDIGHTMQQCDGTYENAQARERTQILLDRANQLDALMIGTGDASEGALGWETFGGDHLSLYAVNASLPKTVVRALISYAGRVPERFVCETDSPYAPRGAAFSRVCAAIVAQPVSPELIPPCDDRIVQCTEEMLGPYELHDFFLYHITVNGFGPRKLFRVAAHAFGXAYSCAQLCAALRVFFTRLFSQQFKRSCVPDGPGLTEVNLSPRVGFYFPSDTSGALWRAELEQLACGE

SEQ ID NO: 76600 - protein, 396 aa, Treponema pallidum
METFFTSESVSEGHPDKLCDQISDAVLDACLSQDPHSCVACETFASTSLILIGGEISTRAHINLTQIARDVAADIGYVSADVGLDAASMAVLDMTHHQSPDIAQGVHGAGLKEFAGSQGAGDQGIMFGFACRETPEFMPAPLMCAHAVVRYAATLRHERRVPWLRPDAKSQVTVQYEGHRPVRISAVVFSQQHDPSPSYETIRETLIEEIVRPALAPTGLLDENTRFFINPTGRFVIGGPFGDTGLTGRKIIVDTYGGMGRHGGGSFSGKDASKVDRSAAYMARYIAKNIVAADLAERCEVQLAYAIGVPYPVSLRIETFGTARASESHITHAVKEIFDLTPAGIVRTLDLCAPRYRSTAVYGHFGREQFPWERTDCVCDLQRAVRPFALSGQIKE

SEQ ID NO: 76601 - protein, 811 aa, Treponema pallidum
MTRKLITAALPYVNNVPHLGNLIQGLSADVFARFCRMRGYHTCFVCGTDEYGTASETRAAEQGLSPAQLCAHYHALHRDIYQWFDLSFDYFGRTTSDAHTELTQALFRHLDARGFISEHESAQAYCLHCARFLADRYLRGTCPHCRNAEARADQCEHCGVLLEPETLLNARCVSCGTAPEFRPTRHLYLNLPALEKAYRSWFCTTNHLWTKNAVRMTEGWLRTGLQERAITRDLRWGVPVPKAGFEQKVFYVWFDAPVGYISITKCGTEAASSQEGGGTDDGVKEKWQSWWLDQQDVELVQFVGKDNIPFHTLFFPCMLIGSGQRWTMLTRLSATEYLNYEGGKFSKSLGVGVFGSDAKESGIPSDLWRFYLLYHRPEKSDAHFTWHEFQERVNSELIGNLCNLVNRTLTFVARTYGGVVPAQDGARSTRAQVMEETLALREAVRNTAKRMTDLMEQVQLREAFREVFALSARANKALQDGAPWKTRAQDRERADALMRELCYVIRDVLILAHPFLPWYTQQAARFLGVQLSSCAPEGGGAVCAAKKDADTAQPDTVQPTLRWSDVGERKGLTQVHPPVILFRPLETETIAAYRARYAGTARDGAGVSVPRTAQMPTGMNKKETDAQQKKEEREMPPPSDTARLSAFFSERVVLKVARVLQVERHPNADMLFVETLDDGSGVERVIVSGLVPYMAADALRGAHVLIVDNLQPRSLRGVRSCGMLLAAEYVDAQGTKAIELVQAPWALPGERATLASAPPVITPHGSAVIDADAFFSVPIRVVNYAVEVAGEPLMVGGRPLVMQRVKEGTVG

SEQ ID NO: 76602 - protein, 78 aa, Treponema pallidum
MDELFLRMRALVAEKLEVEEASITLDSSFRGDLGADSLDTYELVYAIEEEMGITIPDEKANEFETVRDAYEFIKSKVT

SEQ ID NO: 76603 - protein, 432 aa, Treponema pallidum [sequence omitted]

SEQ ID NO: 76604 - protein, 268 aa, Treponema pallidum
MKGKTVSAALVGKLIALSVGVVACTQVKDETVGVGVLSEPHARLLEIAKEEVKKQHIELRIVEFTNYVALNEAVMRGDILMNFFQHVPHMQQFNQEHNGDLVSVGNVHVEPLALYSRTYRHVSDFPAGAVIAIPNDSSNEARALRLLEAAGFIRMRAGSGLFATVEDVQQNVRNVVLQEVESALLPRVFDQVDGAVINGNYAIMAGLSARRDGLAVEPDASAYANVLVVKRGNEADARVQAVLRALCGGRVRTYLKERYKGGEVAPAL

SEQ ID NO: 76605 - protein, 301 aa, Treponema pallidum
MVSRRAQAGNMRELEHFVQSLATAACALGAGLTQVATSERVWYLLRFVAVLCITSAFFRMLRRGVRRVVARRLSAQTQHFVFKTLNYLSFTVMTFTAFHWLGINVSALLGAAGIAGVALGFAAQTSVSNVISGLFVMTERAFRIQDVIEIDGIVGAVQSINLLSVALKTLDGQYVRVPNETILKANLVNYSHCPHRRVKTEVSVAYGSDLRRVQQLLLDVATRNRFVLSDPAPAVLWNAFADSGIDVTLLTWTHIEHFNDLRNAIFVDIDECFKQAGIEVPFPHVDVRVQGACDAPRAETV

SEQ ID NO: 76606 - protein, 630 aa, Treponema pallidum
MDLSLLRSLTGPHDLKSLSPEQVRALAQEVRQEILRVVSANGGHLASNLGVVELTIALHRVFSCPHDVVVWDVGHQCYAHKLLTGRAGRFHTLRQKDGISGFPRRDESPYDAFGTGHSSTALSAASGILSALRYRGKSGKVVAVVGDGALTAGLAFEALLNVGRSCSDLIVILNDNKMSISPNTGSFSRYLSTLTVKGPYQKLKTRLRRALQTVPLVGRPACRALSRLKRSARTLLYQSNIFADFGFEYVGPLNGHHIEDLERVLNDAKKLTRPTLLHVQTVKGKGYPFAEQNPTDFHGVGPFNLAEGIVEKKDALTFTEAFSHTLLNAARTDDRVVAITAAMTGGTGLGLFSHIYPERFFDVGIAEQHAVTFAAGLACAGVKPVVAVYSTFLQRAVDQVIHDVAVQNLPVIFALDRAGAVPHDGETHQGLFDLSILRAVPNINILCPASAHELSLLFGWALAQDTPVAIRYPKALCPPEEDGFSTPVHTGRGVLITRENECNVLLVCTGGVFPEVTAAANTLARKGIFADIYNVRFVKPVDEDYFLDLVGRYRSVLFVEDGVKIGGIAEALQALLNTRHPAPCSDVLAFQDMFYPHGSRAQVLAAAGLSAPHIAARAEWLLAHSVGQIR

SEQ ID NO: 76607 - protein, 125 aa, Treponema pallidum
MIIGVGIDIVEIERFVSWTHNVRLLRRFFHQEEIVDFFKNHMRAQFLATRFAAKEAFGKALGTGLRNMELRNIRVCQNGWGKPRLEVYGAAQAMLAATGGTHIQVSLTHEREVASAIVIIEGEPL

SEQ ID NO: 76608 - protein, 280 aa, Treponema pallidum
MNDVRKILLRISYDGTRFCGWQKQVSGSRERAPSVQGELEKVAEKIHHQKIAVIGSGRTDSGVHAVGQAAHFCTPMRNILAYRFIPAFNSLLPHSIRITDAREVSSQLHARFSAVMRTYRYHLHCAPVAYAHELPYCWHIARMPDIHLLNQYAATLKGELDCTSFAAAGDKSASKSRYFYDTHFSFNHRVLTFEISANAFLWKMVRSLTGTLLHCEKKRCSVREFVRILHAKDRRLQGPPHRRMGYSYGTSVTPNTYSVQNRNTLARELASTGNARWKTY

SEQ ID NO: 76609 - protein, 589 aa, Treponema pallidum
MQDLCEMWRHAVARVLSQLQGPAVEPVEGAQLVMEEPPEPGMGDIAFPLFLFAKRVRRSPAQLAQQLCTLLEEDTSMCAYGTPQARGPYLNVFLNKECVAAHTLDAIFAQGERYGHTQYLQGKRIMVEFSSPNTNKPLHVGHLRNNAIGESLSRIIAFCGADVFKVNIINDRGVHICKSMCAYQKFAHGKTPAHTGIKSDRFVGDWYVQFNRYAQQYPEEAEHDVRDLLQRWESADPHVRALWRTMNEWALRGIKQTYERTGISFDKLYFESETYTKGREEVRRGLACGVFYQMEDNSIWVDLSSLGLDKKALLRSDGTTMYITQDIGTAIFRAQDWPFDQLLYVVGNEQNYHFKVLFFVLRLLGYPWAQQLHHVSYGMVNLPHGRMKSREGTVVDADDILDRLHSAAEEEIAKKGRENALKHAQCIAENVAIAALHYFLLQVSPQKDMVFHPEESLSFNGNTGPYLQYMGARISSLLKKVQEDVEQKGPREVRCDPALLTHEAEWELVKALARFPACVTRAAQGHDPSVITGYLYTLSKSFSRFYHDCPILCEARPDYACARLELVRAVRIVLRTAMRLVLIPFLEEM

SEQ ID NO: 76610 - protein, 416 aa, Treponema pallidum
MRGIIGSMNPALARLQARGFIRQCTDLSALSARMDAGPLTFYVGVDPTGSSLHVGHMLPMFALKHLCDAGHRGCVLIGGGTARIGDPSGKTSMRKMLDYATLDAYAGAIVAQLDHFLSFDHRHVFYVNNRDWLAHLNYIDFLREVGAHFSVNKMLTYEAYKKRLETGLSFLEFNYQLLQSYDFLTLSDRYAVELQIGGDDQWGNIVAGADLVRRVRGKTVHGLTFPLITRADGQKMGKTEQGALFLDPALVSPYDFFQYWRNTPDEDVRRFLLLFTFLSVRDVEAILTQGINCAKELLAYEVTRLMHGTAVAQVALQGARAAFGGCGDKCALPTFELTQCTLQVGIKVTDLFVQVGLCTTKSDARRLIAQGGAFVGLQRVADIGAVIDQSALDLDGTVIVRAGKKRVVRIVTDVLE

SEQ ID NO: 76611 - protein, 592 aa, Treponema pallidum
MGLCVEENITMLQKRSDTLDRLRHSLAHVMAEAVQALFPGTKLAVGPPIDYGFYYDFSPPRPLCDADLAPIEEKMRAILRAGCPFVKEVVSRPDALARFKDEPFKQELIERISADDTLSLYHSGAFTDLCRGPHVQSMRDINPHAFKLTSIAGAYWRGNERGPQLTRIYGTAWESEEDLHTYLRMQDEAKRRDHRKLGPALGLFHLDEENPGQVFWHPEGWTLYVAIQQYLRRVMHEDGYAEVHTPFVMPQSLWERSGHWDKYRANMYLTEGEKRSFALKPMNCPGHVEIFKQKTRSYRDLPLRLSEFGSCTRNEPSGSLHGVMRVRGFVQDDAHIFCTEAQIASEVTRFCRLLARVYADFGFAQEQIRVKFSTRPEQRIGDDATWDRAERALAEACEAAGLSYEHAPGEGAFYGPKLEFALIDTLEREWQCGTIQVDYQLPSCERLNAEYVGEDNQRHMPVILHRTVIGSLERFIGILIEHYGGAFPPWLAPVQAVVIPVAPAFLEYAQHVARELCARSLRVQADVSAERMNAKIRTAQTQKVPYLLIVGERELRAQQVAVRPRTGPQHSMGLSAFSTFLLAKLETRALHA

SEQ ID NO: 76612 - protein, 554 aa, Treponema pallidum
MRRMITVTGMSVQFSDKPLFKGVDLKFVAGNCYGVIGANGAGKSTFLKVLSGELEHHQGSIAIASGARVAVLRQDHFSFDQHTVKDTVCMGHPALYRVMKEREALYAKSDFSEADGLKASELEGEFSDLNGWEAENCIEQMLSGLGVDEAHHDRMMCELDESQKVRVLLAQALFGNPDVLLLDEPTNGLDLYSIAWLEEFLIEFPNTVIVVSHDRHFLNSVCTHICDIDYGKIRLYSGNYDFWYQMSQIMQRQVKDQQKKREEKMKDLREFILRFASNAAKSRQATSRKKIYDKLVLEEIEVTGRKFPYVHFKPRREIGNHVLSCDGLRYAAEDRMQGGSCELFTDMSFTVGRTDKIAFVGQEHRAKTILFDILAGEKQAHAGSFRWGQTVSVGYMGKDTARYFDCDLSITDWLRQFSDDQDETYVRGFLGRMLFTGEDSLKSVRVLSGGEKVRCMLSKLMLSGSNVLILDEPTNHLDLEAIASLNEALVQFPGVILFNSHDHEFVSSVANRIVEITPRGIIDRMMDFDSYVKSEDINATRAQLYGGSVQQLRI

SEQ ID NO: 76613 - protein, 485 aa, Treponema pallidum
MPSADTIARRVAGDSGNAGGRTLLPVGVSRESVQLLERLQNANRQVTAEVLPSVVTLDVVETRKVRVRDPFGGFPWFFFRGPEGPGAGPGGGSGNKGEAEEREYKTEGLGSGVIVKKTGKTHYVLTNYHVAGKANEIEIKLHDGRIVKGKLVGGDQRKDIALVSFEDADPNIRVAVLGDSDAVRVGDIVFAVGSPLGYTSTVTQGIISALGRFGGPGNNINDFIQTDAAINQGNSGGPMVNIYGEVIGINAWIASSSGGSQGIGFSIPINNVKSDIESFIQYGQVKYGWLGVQLVATDADTVASLGIAKGTKGVLAAEIFLGSPAHKGGLKPGDYCVKLNGKEVKDVNQFVRDVGALRIGQTAVFDLIRGGVPMTLSVRITERDEKIVNDYSKLWPGFIPLPLTEAVRKRLDLKASVRGVLVSNAQSKSPAALMGLKSADIVVAVNDQRVSSVREFYAVLARQTREVWFDVLRDGQTLSTVRFRF

SEQ ID NO: 76614 - protein, 350 aa, Treponema pallidum
MRVAINGFGRIGRLVLQAMAEQKLLGKEFDVAAVVDLSTDARYFAYQLKYDSVQGKMGSSLSAPAEDILEVGGHRIKCVCGRGLKPSQLPWKDLGIEVVIEATGIYANESSYGHLEAGAKRVIISAPAKSSDASKPVKTIVMGVNEHEFDPAEHKVVSNASCTTNCLAPVVHVFLKEGVGIETGLMTTIHSYTATQKTVDGVSLKDWRGGRAAAVNIIPSTTGAAKAVGEVLPSTRGKLTGMAFRVPTPTGSVVDLTFRTEKETSVADLNAMLKKASESYLRGVLQYCDEDIVSADVIHNQYSSIYDSRATLQNNLPNEKRFFKVVSWYDNEWGYSNRVVDLLKFISQKR

SEQ ID NO: 76615 - protein, 122 aa, Treponema pallidum
MSRSLSSNGRVRRRKRILKLAKGFRGRCGTNYKAAKDAVSKALAHSYVARRDRKGSMRRLWISRINASVRTQGLSYSRFMNGLLQAGIALNRKVLSNMAIEDPGAFQTVIDASKKALGGGAC

SEQ ID NO: 76616 - protein, 66 aa, Treponema pallidum
MAKMKTKSAAAKRFSVTGAGKVKFKKMNLRHILTKKAPKRKRKLRHAGFLSKVELKVVKRKLLPYA

SEQ ID NO: 76617 - protein, 179 aa, Treponema pallidum
MYWGGSLADNKSLRINGSIRVREVRLVDAVGQQCGVVPTPEALRMARDINLDLVEVAPQASPPVCKILDYGKYRFEMGKKLRDSKKRQRLQTLKEVRMQPKINDHDMAFKAKHIQRFLDEGDKVKVTIRFRGRELAHTDLGFNVLQNVLGRLVCGYSVEKQAAMEGRSMSMTLTPKSKK

SEQ ID NO: 76618 - protein, 635 aa, Treponema pallidum
MCGIVGMVAGRDVSGLLLEGLRRLEYRGYDSAGIAVVGSDCALRLLRCEGRVQSLCALLGQSPLCGTMGIAHTRWATHGKPCAANAHPHCSESVAIVHNGIVENHRSLREMLVTRGYFFHSQTDSEVLAHLLHWELRYTAHLLLAVKKVLTQVRGTYGLLCMDAASPGRLIAARSGSPLAVGLGCGENFVTSDPLALAHVTQRFLYLEEGDIADVHRDSVCVHDAQGNVVARPVVTYQMQLCTQDKGTHRHHMHQEIWQQPHAIRHTLNAYMSFSSSSRAQVRTFGEDRVLDGTSCKTFERLFRRITRVRIIACGTSYHAGLVARYWFEAFAGVGCQVEIASEYRYRTSVVHAREIVLTISQSGETADTIAALRLAKTQGYLCAIAICNGARSTLVRESDAVLLTHAGSEIGVASTKSFTTQLVCLLVLTRMIAQAKKILTQEPEDALSAALQRLPQDVEHVLECEADVARCARHFVHAQHALFLGRGELYPIAIESALKLKEISYIHAEAYAAGELKHGPLALVDAQMPVVAIAPASPGVLFEKMASNIEEVRARGGMLYIFTDVPERFGPVCTPEADAPEGACSQIVTVPSVSPLTAPIFYAVPLQLLAYHIALLKGTDIDQPRNLAKSVTVE

SEQ ID NO: 76619 - protein, 493 aa, Treponema pallidum
MSRKHHIPCTVMILNIMMSVFVTFCTPVRCDLTAQRAYSLSAHTIKLFESVESTVEITWFYSTDVDRYIPTVIYVRDLLKEYAHQLSKQCAVAMKDINLLSQSLRKELGFVARRVTYTRNTASIAYDAYSAILVEYRGMARAVPFVSDTKRLEYDIARLIIQMQQEMSADMMSRGIYVLAPPESLSTTYAHVLPRLQSEGLLPEILSISLPQLDTRIPLLILGSGYVDEHAVTLLDAFLQKGGNALCFVSGNSVQLNDQWTVEEKRHDFLINLLSTYGITINSDLILDEQSFAVSLPSVYETQYDRVSYPFWPVVTLKPYTHGVPVMVQAGIQFLRLFWPSSIRVSFPARVFESTSNHSLCMTAPFNIDPSVDHLKDLAKGKMPAPQAFVAFRDYPGKLMVVSDEYMVSAIVEHTHNGENLDFMINCIQWLCGNDGLLMLKSKNPAWLPLKSFRDEQKFARIVHRARYLNIVAIPVLIGMLFVVMQILYRRKR

SEQ ID NO: 76620 - protein, 268 aa, Treponema pallidum
MEVLRVTSLTKHYGSRRHPVRGCEDVTFCVERGQVCGILGLNGAGKSTVLRVIGGLIHPSSGEVYACHCSLSRYPVGYRRHIGVLHEQNPLYADMTVEQHILFVARIFQLADGEARTAEMIELFQLQSVAHRRVRNLSKGYKQRVGLAQALVHRPKLLVLDEPLSGLDIVYLKEFHKEIVAQNNNLAVVFSTHAVQEIEALCDVFVLLHAGHVLFSGNRAQIAARIVREFPEKKQTVALHLETGTFIAFVFEQYMQWQSAQDAACYAV

SEQ ID NO: 76621 - protein, 362 aa, Treponema pallidum
MYVCEVVFKHILVGVLCFFLVFFVNNVLLFAQTLLTKHVSAADVVRLLLYSIPAALIYVTPFAVLVGSLLGLGRLRNNLELLALQVLGVSPRFLIFPLLSIGLCSALFVFVFSDVVVPASFIRLRQVYWRVLSSVPSLGFESHTTRKHNGVILSVGEVFHSVMYQLLIVDKSDSRSLKVVSSRKSVLESSADQTVPFTIRMHDPCMLIVYRTRPRICDLIYGGRADYHVHTQQTQPEYFMGLGPGGFSTCSLYREIQEKIKAKENPRHIATYQLEFQKKFSHPISVVLFIFLSFGLSTLSNISSQGKGFVGGLIVVLGYWIISIGGQELALRLSIVPSLALWIPNAALFFTALILSMRKSAV

SEQ ID NO: 76622 - protein, 702 aa, Treponema pallidum
MKHSITGTIGDHPLLLESGYLARQANGSVYLQCEGTAILATVCSSAQRQEGLDYVPLTVDFNEKYYAVGKMPGGFIKREGRPKDREILISRLIDRPMRPLFEKEFGRDIHVVPTCISSDMVHPHDVLAIVASSAAVTLSDIPFHGPVAAVRVAYLNGSYVINPTFSQIDAASMEVVVAGTRQGITMVEGGAREVSEDLMLGALEQAQEHIKALCDMQERLRGLCGKEKQTVIPSSAQLVGRDRIYELAYPRLAQALYAQGKGERRSACDAVKRDVAQQYAAQLENDVQRRLFDALFHEMEYEILRLNILDRGLRIDGRAIDAIRPIACEVGVLPRPHGSAVFTRGETQSLAVVTLGAMSDGQVYDDIEGDRRENFILHYNFPPFSVGEIGRMGVGRREIGHGCLAHRSLSAVIPDPEQFPYTVRVVSEILESNGSSSMATVCSGTLSLLHAGVPIKKPVAGIAMGLITDGVRYAILSDILGEEDHLGDMDFKVAGTCDGITGFQMDVKVEAVSASLMKEALQQARVGRLHILSVMNQTISAPSVHISRYAPHIESFKIAVEKIGALIGPGGKTVKSLSDQYRVTINTDSDGTVTVSGRDAQSVFDAKVAVVGLTEDPRVGRVYQGVVKRIVEFGAFVEIFPGKEGLCHVSKLSRSRVSKVSDVLQEGQRICVKLIDIDRMGRLNLSYIDALEGKSGGLDTTK

SEQ ID NO: 76623 - protein, 89 aa, Treponema pallidum
MALTKERTASVVQQYGSGEKDTGSSSVQIALLTERIRQLTDHCKVHPKDKSSNRGLLVLVGRRRRLLRYSRRVSMGAYRSLVKSLGLRK

SEQ ID NO: 76624 - protein, 275 aa, Treponema pallidum
MRIFRWSQLQEGACIACDRGAAISVGGFDGPHRGHAFLFDKVFAAACAPVADRARCTGLITFTHPPRKHKTSSYEGDLSTLRLRLRYFRARGFDFVVLIDFSKDFARIPGGVFFNTLLRAVRVCYLAVGVDFRCGHGLDTGVRELRRLGDAHSFVCDAVGHYTLEGVRVSSSAVRRAVRCADFESARRLLGRAFSLDGEVIPWQQSGGCARTLCAERGRVSQTLPPEGEYAVRLVQGSGVGLRAQLSVGSSLVQLRLGTEALSHGREALDSIEFE

SEQ ID NO: 76625 - protein, 366 aa, Treponema pallidum
MCRLSMPDAIVPFAKVSGLTSFAALAQVRRLLGVKKVGHTGTLDRFADGLLLLLVGGFTKLAPVMTRLEKSYEARIQFGVQTDTLDPEGAVVRCSLFPTFARVRAALPHFTGSIDQVPPEYSALKFGGVRASDRVRRGEAVCMKARRVFVFDLQVLGCEADLGEFKKTQAGRGAAIADLDLTRVRAVTLYVRCSAGFYVRALARDIAAACGSCAYVSHLRRTRIGPFDLAQAAGVSRLGSWTWGKERASCGAACFDVGAPPPPSSGGVATDSVSFGCEDLTVREIKQAVVSCDVDFANRIGLTACSVHAQYASRFLHGERIRACWFQSFGTRRPGERALVFSEGRCLGLIRKAANGFSYDAVFCTE

SEQ ID NO: 76626 - protein, 842 aa, Treponema pallidum
MVAKVTAARRVSCADENRTPGDASQATISAAPEDKKQGFPDIREDGVARGVSASCGAVQNAASAQVPGARTPGVIGVPVASKTVEEARGGGAKRVITKRVGGVFVLDDSAARPNRKAGNLASGARLSRFSRSDRQRSDGFSGTQARANAGGVRRGEGRPFARDFSRGSTGGYRPAVRGPARPAGRVGSGPRGPAPLQVGAGKPAQNKRSFRGRKQQTYQYQHKDRLELEEKLLQQKKKNKEKLAAVPRSVEIMESVSVADLAKKMNLKASELIGKLFGMGMMVTMNQSIDADTATILASEYGCEVRIVSLYDETIIESVGDEHAVLRARPPVVTVMGHVDHGKTKTLDAIRSTRVAEGEFGGITQHIGAYAVSTPKGSITFLDTPGHEAFTMMRARGAEITDIVVLIVAADDGVMPQTIEAINHAKASKVPIIVAINKIDRADANPNKVMTRLAELGLAPEEWGGDTMYVSISALQGIGLDLLLDAIMLQAEVMELRANYGCCAEGRIIESRIDHGRGIVASVIVRRGVLRVGDTYVAGVYSGRVRAIFNDQGEKIQEATPSMPVEILGLEGMPNAGDPFQVTDSERIARQISLKRQELRRYENARNVKRITLDKLYESIEKGSVSEFKVIIKGDVQGSVEALKQSLEKLSTDEVQLRVIHSSVGAINDSDVMLAAADSNVTIVGFNVRPTPQAAVLAERERVEIKKYTVIYQAVEEMERAMEGMLKPSLKEVVLGSAEVRKVFKIPKVGSVAGVYVLEGVMKRNAIVHVVRDGIVLHSGKVSSLRREKDDVKEVHSGFECGVGVENYFDFRERDRLECAEMKEVSRKLKDAALSDAARLQG

SEQ ID NO: 76627 - protein, 485 aa, Treponema pallidum
MFGVSNDDIRKYAQEKGLDEDFAFKIVEQTLKAAYKTTFKTDENAVVTFGEERVCIYARKRVVEEVYDRVSEVDLSTALELDPTTSLDSEVLVELESEDFKRGSVQAAVQRITELSREIQKDALYAEYKSKEGEIIVGYYQRARNEHIYVDLGKVEGLMPKSHQLPQDDYRQNDRIKSLVREVRKHPKSSVVQLILSRTDSAFVKELLAVEVPEIYDGIVEVAKIVREPGYRTKIAVTSRRDDVDPVGACVGPRGIRIRMVIKELNDEKIDVLEYSPDPVIFIKNALSPAEVLNVVVLDEEKRSALAIVAESQLSIAIGKQGLNVRLANRLVDWNIDVKTESQFEEMDVYTDTRRAAENLFDNDYQEESEFSSYVGFTPELIKILQDNGIQDVQTLVDLGEEGLRALEGMDEAHVQELLAAIEENFEVVEEGEEASVTSSPGTGGDEDQALQCPECGVRITTDMSECPHCGIGLSFEFEYEENEE

SEQ ID NO: 76628 - protein, 156 aa, Treponema pallidum
MNFSPNTLGSFESCAEVVRSLGCALVDLQWSVSAVSRRVQQAQGRARAVIYSAGGVTLDVCARVHRILVPRLQALGGVRTVFLEVGSPGERVIRNAAEFSIFLGETVKVWFCTGQFQVGTLAFADETCLTLTAGGVPVTIPYVQLTKAQLHPAVRA

SEQ ID NO: 76629 - protein, 1239 aa, Treponema pallidum
MTDFLFSFFQSLNAEQRRAVFSSHNAVVTAGAGSGKTKVISARYIHLVVERAIPVERIVVLTFTRKAAMEMARRIYEDLRLCVQSASAQPEPGHEAYLLRAREALARFGEARIMTLDAFSHEIARVGARFFGIAPDFSLSEEENRALAHECAEDFFLEHREHPVVLHFLQQEHAEDCVRELFFIPLQDHGILTHPCDFRAGLAHQIATARGLLKTVLCDIHAALHAIRHHMQEADAQNALIARCVALFAAQDTAFSYTPAAEADAIADAFLARGYEEYAAKPDEFSVSDPDEGARRAAHDCLRYCAAVKTLFCLKGNLGGRAGAAQAIKAQVKQLRLQLVPQMERLHAFFAQVPFLVALSSLLELLQARFIRQKRERNCLSHADVAHLAVQVLRQYPEIRVSYKRGIDAFMIDEFQDNNALQKELLFFLAEHEARTAHFLPPAHALCAHKLFFVGDEKQSIYAFRGADVRVFRSLAGVLTPQVSGASQQELPLSAAAELQPTLQTLRINYRTEAALLERLNILFSHILRGPSESAENGYEVGFQYMQPARCTAGIEPQFRVIGVDRHRFSRPEHEAQHSAARPTPQAGRTGASEDSEDSLSAQETEAWALARAIRAMVDGGTLVRHKGEAPRACTWADVVILLRSADKQARYERALRLWGIPYTSLQTRGMFCDAPLSDLLAPLRLVLEPADRHVYAQVLRGPFVRVDDDTLSLLLLPPAPPDAPFSYIPAELSAPAARCVRAGADFFARVQQQVRRLATNTELLTYLWYTEAYGTLLAQDPLARPYHVIYDYAFELARRADRQGKGIGEFLDFVDACLSAQERVEELELPCTDRACGAVQIMSVHKSKGLEFPIVCVPDAGSSGPRVMARVGAVHSPYGYIPRFLPHPEGVHPIFVQEQDTRARAYRAELRRVLYVAFTRAECHVIVSGVLPISDGHPAPAVSRSLADICSLLPSGDGSEPPSSLSFFSELLPALMHAAPLPPHPSPSVVPAPVSFDECLPLARPQAYQRALTGSARQSVPQASAPRDWYAAVPVRAPHYYPRLVQPVTSLVSPAPGQNSASASPSPLTPQSPRGVEFGTHVHELLAQVFQSPAPTVALHSVQRVDSPAARLVACFLHSPLGCRACAAPAHQRFAEFSFLTRAPGNTKPPHGAEYQAGTIDLLFLSNGVWHLVDYKTDYEEHPARYLPQLQHYARAVQDLFSDHPVTAFLYYLRTGHEFSLEALESHFLKKNAVPDSE

SEQ ID NO: 76630 - protein, 532 aa, Treponema pallidum
MEQARALLQGKTVTIMGLGVHGGGCAAACFCAEAGARLTVTDLRNADALTPSLKRLRAYPSIRFTLGEHRLEDFENAHVVIKNPIVKGAHNIYLSAAQRAGARIETDISLFLRLSPAPLLAVSGSKGKSSTASALCYSLRALGFPAFLGGNSTVSPLEFVRHTTPATPVVLELSSWQLADLRAVDAQDHTVHHAGLLRPEIAIMTPIMADHQNWYADMESYVADKQVLYAHQGTHDTLLCNADDGWGPRFACEAQKNGVRVFWYTAQSPETACRACTPRLMERALWRATDGTYWARFAEGDRACMLIPPQLHVPGRVLQTQVASAALAALLFAQRHSLPPSSCPPCFCAHSHSPAYANHASPPDYACPSAHSPFQEHTRRLAQALESYTGIEHRLEFFYEKGGLRFYNDSASTVPEATIAALEAFDESVVLIVGGTDKNADYQPLAQAAAKAHALYLLAGSATARLQPLLHAAQVPFYGPFTSLEVLLQDLRARQKSPGVIVFSPGAASFELFAHEFERGTTFKSQVRIIFE

SEQ ID NO: 76631 - protein, 123 aa, Treponema pallidum
MSLRIRLKKLGSKKRPYYRIVVQDAREPRDGRAIEELGIYQPIAPKGTEVSFRLDRARFWLERGAQPSDTVRRLLQSRRGSVLNAVASDERRVASSQQAADLAHVESVSCAAPIPSSPGGQGV

SEQ ID NO: 76632 - protein, 80 aa, Treponema pallidum
MVTMEEELIAYIARALVDRPGEVTVTKSPGEGLEILQLRVASEDVGKVIGKHGRIARALRTLLSASAHASQTRYALEIID

SEQ ID NO: 76633 - protein, 174 aa, Treponema pallidum
MTARIVSTFGVAGLLRLKSFSGEYAHLATLKQVCLAPPRSRSSGTLACALPREAVHMVEHVLLRAQDALLKLHRVDTVECARTFVGAELRVPRAEACPLSAGEFYLADLCRCELVFEGSAVGVVLSVVEGGGSSLLEVQRTHGGVCYVPFHRTFIGDVDVGRKKIELLQRWILE

SEQ ID NO: 76634 - protein, 250 aa, Treponema pallidum
MNIDVLTLFPAIPRVYFSTSIMARAVSDGIIHYNIVNIRDFAHDKHKHCDAPPYGGGPGMLMRSEPLGKALDSVDAPKKRVVYVTPSGKLFEQGYARSLAQERALVLICGRYEGIDQRIIDEYVDDEVCIGNYVLSSGEIAALVLIDAVSRCVSGVIRHESLEEESFVNSLVEYPQYTRPRCFHNRDVPPVLLSGHHAHIRTWRLARQIEKTRRNRPDLLSAARASAAWTQEAESLLKELDYELPPHPTN

SEQ ID NO: 76635 - protein, 123 aa, Treponema pallidum
MSCHLIQQIENQQRKEPAETFRVGDTVRVHFKIVEGKTERIQAYEGLVLCFKNSGVRRTFTVRKNSYGVGVERIFPLHSPRIERVDVVRAGKVRRAKLYYIREKIGKAARIKARIVKKPSPSA

SEQ ID NO: 76636 - protein, 449 aa, Treponema pallidum
MNENFEKIQTLLEHKRYVPLIANLNEMNEVDVAHVLDMQSPAQALLLFRMLPKNLAANVFAQLSSSKQSAFLATITDRELAPILAELAMDDIVDLVEEMPANAVKRILAQTGETERQVINQLLKYPEDSAGSLMTTEYVDLEKQMTVHDALCCIRETGLKKETVYTCYVIDQNRFLHGVISLKKLVLSQGDLLIENLCERDCIFVHTHDDQEAVAAVFKKYGFLALPVVDTERRLIGIITVDDIMDVMQQEVTEDFQIMAAMQPSDEAYLETEVFTLVKHRIGWLLLLMVSETFTGNLIAGYEDLLVTATALTTFIPMLMDTGGNSGSQSSTLIIRGLATGEIQLHDWLRVLYKELRVALAVGGILGTTSLAKTYFINGKPLALCGSVGITLMITVVAAKLTGGLLPILAKKLCLDPAIMAGPLITTIVDTTSLFVFFNVARVVLRWPL

SEQ ID NO: 76637 - protein, 778 aa, Treponema pallidum
MTLDQDFVDALSVQEDELAERVARELHIRTAQVTAVRSLLKEGCTVPFIARYRKEAHHCLDEVLIRDCERLFHTHLARETRRLEIIRAVFKEGMLTPTLYEHLRSAPTLAALEDLWAPFKKKKKTRGMQAIEKGLEPLARLIETQCATQAEIERAAAALVAPAADSDRAVSSAQDAIAGACDILAEETAHCNANRAALKSFYLSAGVVTATGIGDAHAAHTSVYQMYWDYAEAVRDIKAHRVLAINRGEREGILDVKITVDLDAAVEQVQEAVHPNNRYHRDAITDGVVRLLSPAVLREIRADLTASAEQHGINVFSENLTNLLMTQPVKGTRVLGIDPGIRTGTKCAALDETGQYLGSFVIYPHNTDHARAALTQALDRYRIQLVAVGNGTGSHAVQELIASIISETHSAVAFTVVEEDGASVYSAGDIAREEFPDLDLTIRGAISIGRRLQDPLAELVKIDPKSIGVGLYQHDVNQKKLSEELHAVVDAVVNSVGVNLNTASVSLLKHVSGVNSALAKRIVHHRATYGIFTSREQLKTVSGMGQKTFEQCAGFLKIPESTNPLDNSWVHPENYATGKIIFDILRAGGTVSAAQKAQVQSQCAVSDRTVEDIITELQKPNRDPREDYPKPVLRQGLISFADLKVGATVQGKVKNVVDFGAFVDIGIKETALLHVSQMSDHFVSNPLKKVKVGDVYTCTIIGLDEARRRISLSLRQEQRAPADHTATPSRRAPRPRAPEGKTSPERAKTRGTSPAPGQDFARYQPFAQFFKGKTPHPK

SEQ ID NO: 76638 - protein, 540 aa, Treponema pallidum
MLYRKPITVCLASCSVQETHGSACDVSSIAYDSRAVREGSVFFALRGTHAHGAQYIHAAIDAGACAIVHDCPLDTYVVGVYYARVPDARCALSSAAAAFYDFPTRALTVIGVTGTEGKSSTVSFIAQLLRLCGKRVGFISTVEYSLGDDILPNAEHQTTPESLTVQRLLAEMREHSCEFAVIEASSHGLSTRTARLQDVAFDVAVCMNVRHEHLEFHGSFEQYRFDKANVFRALDAHDHIKDGRRVPSFGVLWAEDASAVYFREATHKPCFFFKRGTGAEQRTAACLERMPCTLLWVQTLPQISQALRLRFVLSTVQEPAQPAQDGAHDVSVPLEGAFNACNIAASFLVLHGLLGTSLAAFAQHVQYVQPIQGRMQRVDMGQDFEVLIDYAHTPSSFEEILPPLAARVRARKRRMLVLFGSAGERDTQKRAMQGAIASRYAHVIVLTDEDPRGEDPMGILCMIAAGCEHKKLGKTLFLIPDRVAALRHIFSLARAQDLVLLLGKGHEHSIIYAHTVQPYDEERTARELLRASLSSDTLLS

SEQ ID NO: 76639 - protein, 222 aa, Treponema pallidum
MVTPSQHALLAEGVAHLTDARTAPALCALLKQYLEELILFNTRAHLVHVTHTEELITHHLLDSLSAWPHFTNARAIADIGSGAGLPGIPLACALALYAPETELTLIERREKRIAFLENACARLALPHLRIVHADAHDLTPYTYDAITFRALCPLNHPTVYMLLNKLRPGGVILAYKGKRKLIEQETRDFLPQSCSVFPLHVPFLHEARHLVAIHTPCAAPPQ

SEQ ID NO: 76640 - protein, 665 aa, Treponema pallidum
MCMGSFSYCKESCTLSSFCSRWLRPSTNKGRTPIANRRAGVFVMKKNMFIAVVLSVLVLVGASFLQELLYPSASSSHSAAEHTLSAVPEETRTQSAHGGAADTQETTQPAAHPSGQVLVFPESETEERVERTYVVRTPLVQVTFTNRGGDILSYQLREHYAAQRREYVEMVEQARPDHRAFSLALGDEYAPNVNALFQVKQEIGARGVHSIGFYRSVATQHADGTRTPFVLAKRYVFYPDNYMFELHVSLSADVLEEREDSRQGAKVRAVAETNAGPATTVLARANGFDFGTASYTLRTPPEIGPERNAADKYEFRTFMVGAGGKAKTYALKGDGREQVDTPVSWASVSGKYFALIVLPNDADSLKRLVLSAPQAETAVQHHIAFVRRAVAQPAVADVYRVYIGPCAEQYLSAYNVASRNPYGLERTYIDAVAVSGGILYPLEVLLKWLLRLFYTLIPNWGVAIILVTIAIKVLFFPLTKRSFIAMQKMQELQPHMQRIQERYKGNTQKIHEEMAKLYREAQYNPLSGCLPTLVQMPIIFAMYRLFNNYFEFRGAMFIPYWIPDLSLADSVWTLPFALPVTQWTQMRMLPVLYVVSQIMFSKLTQVPHTEQQKTSMTIMTYVMPLFFFFFFYDAPSGLLVYWTAMNGVTLVQQLVMKRTANKNKT

SEQ ID NO: 76641 - protein, 51 aa, Treponema pallidum
MKRTYQPSRRKRVRKFGFRARMATRGGRAILRRRRAKGRRKLTVSDEKKPY

SEQ ID NO: 76642 - protein, 345 aa, Treponema pallidum
MLCLFLCGCVMKKWCGLAFSIFFSFFLRAQDLTFQEVFEVAACNDDVSLLNKMHKRTVRDNQFDEQLTDRVHLRYPASVYYPAHQGTYPLIMLSRGWNSTQDYQRALARFLAAQGFVTVVFTSRAQRRPPDFLSTFDSVYALMQRVNEQEGSPLYRKVDFTRVGVLGHSMGGTAALHYANRYPERIRTVVALHPFNGGADMVNMVGGKNEQLGTDLRSVRAAVLILTGTKDMLAYPERSYEFFQSLPQDVPACFLSLKGMGHGAGTDKYFEVWGFTYNKTLSVESFALYRRLISAWFRLFLREEEEYRALFNEHGRPFRNLKPHLSQETGRAHSYPFFCEQNISN

SEQ ID NO: 76643 - protein, 342 aa, Treponema pallidum
MRTYFFMSVCSVLTCFGLYAKEKVVLKIASIAPARSIWETELKKLSAEWSEITGGLVSMKFYDMSSLGGEREGIRKLKSSRPGQAAPLDGAVFSCLGLSELAPDSGIYTLSVPFLIQNEKDLERVLHELREDLDRPFRAAGFRVITWTNAGWLSFYTRAPYASLGQLKKQTIALSSLDSSVLGTCFRICGFDIKDAPNARLAPLLKAGSIDGFLSVHLFTWATGFYRYISYALDTKICPAVIGMLISDGSWARIPSRYHDAMLQAATRVRQRLANNLETLDRECSNNIQKAGVSIVHLTPQEIQEWRTEFAADVKRIQARLPGMLNMTLYEKIKHLLYSAQR

SEQ ID NO: 76644 - protein, 410 aa, Treponema pallidum
MLEDIVNTLLYFRQRVLRTTLSFLGIAVGVASVVVITSIGESLYASLAQSVGEGERRLIRVRPEWDYVKNEIMFQPTESYRTRLVQSSEDIEGVFYNSSLKALISSPHTGGKERNITGVEPRWLELKDFKLEYGTFFSPADFKTHRHCAVIGGLLAQELFPEGNALGKRMTVTILSRASGAERALSFPFEIVGVLQEKGSLISGIPSYRVFVPREFISLEMGAGRVADAVEVCVRDVQVIAAAEKRIREFSDFFSNKSGSVSLWSGAGEIKSFRSVLSMVSVVLSVVAAVSLIVGGINIMNIMVVTVTERRREIGLRKAVGATCATIVQQFLLEAVLLTLAGCVCGLILGMVLSYGLFSVFSPEGITVVFSLSTAGMRTAFFMSLGAGIFFGLKPALQASRLDPIIALAQ

SEQ ID NO: 76645 - protein, 409 aa, Treponema pallidum
MVGEDFLYALHTFNARRGRTVLSLLGIVVGITSVVVVATLGSSLGASVEKLFEEDNNNIISVAPVAAHDDGVPRGQLVLTEHVRHHLKERVAGVQGFFYLNYLQASASRRSLHAGAVSVLGVEHGWLAASGLTVSYGSDVSVIGYAVGTHSVILGKQTAEGLFPEGNAVGKTITLYVPIGRNKVLPMVVRVAAVLKEKDDFSFSSAAQVLIPRSVLTREFSRRIADAMDLKVYDSGSIAHVEDKVKSVLTNLTGNEKAFEVSSLHLIVEQMRSFLRAMNMVLTGIAAISLIVGGIGIMNIMLVTVAERRQEIGLRKALGASRMHVLHQFLVESATLTFVGGLCGVVLGLLLSVIVIAGLNAFDFQMTFSPSVVGMFIAFAGSVVIGVCFGSYPAFQAAGLDPIQSLEDR

SEQ ID NO: 76646 - protein, 448 aa, Treponema pallidum
MERSWEGIDRGVPVYGMGCTMVAPGMPAAFARSVVRASAWVGVALMCVAWSVSAAEGTRSGGQAQERLSSWRQVVQRMEVHLRAAYTFFESGDSDRAYEQIDKAYFRYYEAKGMEKITMGYLSGARKAAVENAFFAYRRSVRGARDLAGVAFCRDKLVTMLYEDARALDGVARGRAGFAAHIATFVASCVLVLREGIEAILVIAAIVAYLVKTGKERCCAAVYAGAGAGVLFSVVLAVMIVRVLGSEGGAAQEIIEGVGMFFAAAMLFYVSNWMLSKARACAWDRYIRQKVERSVSRGNQWALVATAFLAVAREGAELILFFRGIPVAGPYGRLAVWAAVTVSALVLVGVFVAIRFLSVRLPLRPFFVATGAVMYLLCFSFVGKGVSELQEAGVVSRSTAPWMHGWSFDFLGIYPTYEGLAPQAFVVALVVLSAVWWCGGLCRGASST

SEQ ID NO: 76647 - protein, 553 aa, Treponema pallidum
MMPRMTGKADLNTLVHKLHPLEIKVLKNCAMDEILSTSLLISRLGFKEGHANQAFSWLRAKRIIEEHQREQMRSFELTPCGYAAASDGTAEERMLTFLSSPPSLTAIADAAEHLHPRPPLCNGLSLPELAHALTLAPKDVGSAFGILAQEGILRMDGEKRIHIVSPHVSDRMSLTRTLLQRAAARVASPSEASDTPPGTLFESELSDDERRVMERIAKKRGASDSLFKVSVRERVTFTFTPTARAVQEALHTAGLTGNEIGALTVECLKSGAWKTQHLRRYNVHIPPARIIPGRSNAYADFLEHIKDRLVALGFQEFDGPLVETDFWNADALFMPQFHPARDIHDVYYLKHPTHAPTIPEPFLSRVAATHERGADSGSLGWRYSFDRDFTRRLLLRSQGTALSARHLPTAHIPGKYFGIARCFRHDQVDATHLADFYQTEGIVLGTDVNVCTLLGMLKILATEIAGAQEVRYVGGYFPFTEPSIELHALHPALGWFELGGAGLLRPEVTDPLGVHVPVMAWGLGVDRMALLALGISDVRELFSPDIESVRLRV

SEQ ID NO: 76648 - protein, 274 aa, Treponema pallidum
MGTLYVVATPIGNLADITLRALDVLRTVDVVACEDTRRTRALLSHFGIHKRLVSCRAHNEAQAARRLIHFLSTPISAFLSPEKGRGRQSARRTRARPGETVGTAALQLAAEATGEQEVCGSPHAQVAYVSDAGTPGVSDPGAVLVRAVRDAGHTVVPIPGASALTTLLSVAGVRDKTVLFEGFLSPHPGRRRARLVQLCAQRVAFVLYESPYRVQKLLEDLVAVAPESQVVLGRELTKVHEELCVGTALRVMESFCARTRVRGECVLLVSAEKF

SEQ ID NO: 76649 - protein, 257 aa, Treponema pallidum
MQIFDTHAHIGLIHPDPVERLRVVQEARRASVTRIMSICNSLHDFAAVYETLQFSPSVYHAVGVSPSEVMAPGKDWIDTIQKSLQLPQVVALGETGLDYCKKYGDKRSQIGLFITQLDIASKAKKPVIIHNRGAGQDILDILSERIPDQGGVFHCYSEDAEYARMALDLPVYFSFAGNLTYRNARNLHETVLALPLDRILVESESPFMSPATYRNKRNRPAHTVETVEFMAELLDMDMLELADQLWKNSCACFHLPE

SEQ ID NO: 76650 - protein, 340 aa, Treponema pallidum
MQQHALYHPVSIGPLSLKGNVFFAPVAGYSDSAFRSIAIEWEASFTYTEMVSSEAMVRDSLNTKRLIRRASNETHYAIQIFGSNPAVMAETAKLIVDSAQPSCIDINAGCPMPKITKTGAGAALTREPTRLYEVVKAVADAVYAQDARIPVTVKIRAGWEEAHLTWKEAARAAVDAGAQALALHPRTCAQCYAGEANWDIIADLVQCARGWGEVPVFGSGDLHAPEDARAMLEHTACAGVMFARGAMGNPFIFRQTRQLLTEGYYTPVTFEQKLRAAWRELHLLAQDVGESSACKQMRKRFVSYAKGERGKTQWCQRAVHASSFADFAAVIRDACPCIGL

SEQ ID NO: 76651 - protein, 387 aa, Treponema pallidum
MSYRTRSSLDRKRDYICPACNLYKAGSCARIVHPRWQGILVKECVSKEKRIYDLKQLLEISKSLNSLLEFTHLVEAILYVAMAQTKTLGAALFTKKNAGMKKLSLSRNVCGFDVSHHAQLIISEEDPILRLLDEKACCLSPEEVQSALAPSKSVRSLLDLQPSLFVPLRAKDHLVGLILLGKKINVHEAYTPYDQSIIMDIAQLAAIAINNALLLEQATTDMMTQMKLKHYFFAMLTAKLDTLSTQETVSVLMLDIDFFKQINDTHGHLCGDLVLQHVAEIIRSCTRPCDIASRYGGEEFMLMLSNNSSREAAHVAERIRVATEQLTIPYHEVSIRVTVSAGVAEYLPNQESAETLIKRADSALYQAKQNGRNKVVISEKNMCSSQE

SEQ ID NO: 76652 - protein, 639 aa, Treponema pallidum
MAQYEFQTEVSQLLTLIIHSLYSHKEIFLRELISNASDALDKLKYEALVDGTYKQLHCEARIDIAFEEDAQRLVVRDTGIGMNAEDLRANLGTIARSGTKAFLSTLTRDQKQDSNLIGQFGVGFYSAFMVASKVEVITKKAAENTVWKWTSEGQNAYTLDEVDAAAFPVLEGVAEGSAGTCVVLHLSQENSEFATRWRLEEVIKKYSDHIAFPIYLHYLQKEYDKDGAVTDTQKKVDQVNDAGALWKRPKSELKEEDYHRFYQTLTRDSTPPLLYVHTKAEGTQEYVTLFYVPAKAPFDLFHADYKPGVKLFVKRVFITDDEKELLPVYLRFVRGVIDSEDLPLNVSREILQQNRVLAAIKSASVKKLLGEFKRLAECDGKKYDEFITQYNRPLKEGLYSDYEHREQLLELVRFRTLSESVPEDGWTSFAEYVSRMKPDQKAIYYIAGNDDRVLRQSPHAESYRLQGFEVLVMSDDIDGIVMPSVSKYKEWELRAINRLGSEEELRPNEETDAAAQREQGFKPLLERLTHILSDSVKEVRLSKRLSDSVSCIVIDENDPTVQMERLMRATGQTHKSKIKPILEINASHTLVQKLKESTDEAFVEDLAFVLLDQALLIEGMDVGSSVDFVKRVNRLLARG

SEQ ID NO: 76653 - protein, 602 aa, Treponema pallidum
MYSAHTPWYDGQVMDYPRRTIACGELRRCHVGTVVVLNGWVHRKRSHGTVSFFNMRDRSGIVQVIVSQEENASLWSTVNRIRLECCLAVEGVVRERPPSMINRALHTGEVEVHARTLYVLSENAVLPFRVDDVVHAHEDIRLKYRYLDLRSQRMQERIALRSRVALAIRQFLSMKGFIEIETPTFICSTPEGARDFVVPSRVCPGRFYALPQSPQLYKQLLMVAGFDRYFQLARCYRDEDARGDRQPEFTQIDLEMSFVSRDDVMRVNEDMLRYVFRTSIGVELPTFFPRLTYAQALDQYGTDKPDMRFKPVLQNADFMGMLGTFTPFEEVVAQGGSIRALVLPGKARCYSRRQIEALESIARAHEAHHLFWLKATGGGLEGGIARFFAGVESEVRRRLSAQDEDLLLFVADCRHRVCCVALGAVRSALIRDESFPEKELFSFVWIVDFPLFEWNPAENKWDPAHHMFSAPQEQYLETLEQDPGSVKGDLYDLVLNGYELASGSIRIHDTQLQKRIFKIVGLDPEEAGEKFGFLTEAFKYGAPPHGGIAHGLDRLVMLMTGSESIRDVIAFPKNTLAASPLDNCPSVLDKRQLDELHLTVHV

SEQ ID NO: 76654 - protein, 278 aa, Treponema pallidum
MLCMLEMDSARQRFVRDVEHIRHEDMHEMGICARRGFTCSDTHPHRKRHSQKKCCTRAVPTQGNGDCRTRGSSRILTPRMSTWTHIWSTAFTLLFIIDPIGNIPVVLSVLRTVPAERHTRIIFRELLLGLVLMLSFLFCGKVFLSLFQLETGVMKMAGSVILFLVGIKMVFPDQHALPSTTEEEPFIVPIATPMIAGPSAFTTLVIMGETKGTSRLATCAALLVAWTLACLIMISAPCLYRLLKEKGITALERITGILLLILSIQMCVEGARGIIATS

SEQ ID NO: 76655 - protein, 1033 aa, Treponema pallidum
MPSAQHLSEFARELKTLGNEPDTLKSWGTLYDDLPPPESTPDGAQPAPTPERQSAPASASASGPVSAHGQRPFEPDTEASSVASGEEVVQEDAHAPQTRMHDSAQEPAAEISLFSEERTPETMPTAAWSAPPDPLFETEHAVPPLPLDPEETPVPGEKGLQESAVQEEDAGFNQMPATGGQTSENQQHFDALLASLDLDSANGERVVPENADEFAAQVPESLLEGLHPEDQETKRSQEEPVSYDFPAFDLDQVAPPTPDAPDSSNSALTEIEITPALSEHPTQTQETGTTSPQSQTVHADASALGPSASDPNFSPGSADNLVAQFPIEESVQIPPFPADGFELPGKFQEFARESESPYFSPDTTADADQAQTISETEYQRFLQRLDALPLPVRIAVQEYLSSEETSDKEGYALISSIANNASPKAVATQLEHILKKPLHIPRKFERKSAAAHEREKSSLPYIAKHTVLPLTASSAAILIFILSLAVLSWHFLYKPLHAHLSYRAGYHALELDRYEDAHTNFEHAKQYWKIKHWYFRYARALRDKKQYTRAEQIYTELLFDFRHPKQGSIEYAHMLCNELRKYEQAETTLRRQGLDHHPNDPDILSALGDVYLEWAEEDPAQYEQARKTYQSLIASHGTRDAYLARMMRYFIRTDQLAQVLPLKAHFTNTRARIAPEDLTELSGYLLEKRYESQPSDSLTLQSKIEDLRALLERAFKADPMSADAAYYLGKFFVYNHRKDSARELLQQAVNRYPHMPHSTVRRTLREIDAMRLLGTLLLEEKGHAAAREIFTQALTRYRSYIVMRDLPPHRTIGKLYRDYADMDYFIYKNYDSALEHYQHARAQLLDTPEVQYKIGYIQHKKNNYPEAIRAMNAAYEHNPQDKHLLYGFGTLLCKRGDYFASQGYYEQLLELLDAQRTRRGVMLPHIEKADAAFVDLYMRTCNNLGVVLHRLATTHGDSRKNARALTLFAESSRAWDALTRHPETRVRSQATGLSYLNVHHMTRPYTEFQPELYDDIPLLLEHEEPPIQKEQEN

SEQ ID NO: 76656 - protein, 799 aa, Treponema pallidum
MERSPLPRIIALTFGTLLFVSAVLLTLSTFLPLFTLHRASHWFFVPGTLLYETYAFSSLLVPLLLLHTALLLFVGGRSLRAESALVAFPLLFITAVCGEHGLYALRRALAARSISPSTRGGIDIVCVLCLLALLGAELYAALIYGERCYVWFHARIPRDFIADGFQDPSFPPSTADHPDTVSPPPAPSCATADVQTPEASAPPEGQFSTEVPLQGGEFLISEAEVQPATQVAACGGVSTPTALAPSVPSQAPFPLLPAPGLIQSNLPSDVHAPASPGSLPSVIPAQAPCVMALSPISAPSVAPAETLIPAQDDEQGPPRPIPASAAPLRHPCRGYQVPYDLLDQYSEDTYEGIDELTKNLALLLEETFSEFNIRVEITGIKKGPVVTMFELLPPPGIKLSKITNLQDNVALKLAASSVRIVAPIPGKHAIGVEVPNKKRSLVTFKELLHTRTAGSNRMAIPVILGKDVTGEPQVIDLAQTPHLLIAGATGSGKSVCVNALILSILYHKCPDETKLLLIDPKIVELKLYNDIAHLLTPVITEPKRALQALQYILCEMERRYALLEQLECRDIKTYNKKIQEKSIATQPLPFIVIIIDEFADLMVASGKELETSVARLCAMSRAVGIHLVLATQRPSIDVITGLIKANIPSRIAFMVSSKMDSRIILDEMGAEKLLGRGDMLYMNPSQSFPTRIQGAYVSERELARVIAHVRAWGTPEYLDEEIFFDDDDASISGNFVDESDPLYEQAVQVVQYAGKASTSYVQRKLKIGYNRAARLIEEMEARGVVGPPNGSKPRDVLRS

SEQ ID NO: 76657 - protein, 201 aa, Treponema pallidum
MIPAIEEVVEHLSRLPGIGVKLATRLAYHLLKRDPAEAQVLARGIACLHERVYRCVCCGAFCEGRTCALCTDASRDRGIICVVERAQDVEMMAGVGEYRGLFHVLGGVIAPLEGVGPDQLRIAALLKRLQESSVREVILALNPTVEGDTTALYVQKILANFPVIVTRLASGIPVGGDLEYIDRTTLAHSLRGRRPLDCSEA

SEQ ID NO: 76658 - protein, 572 aa, Treponema pallidum
MAYQVTATRYRPQRFQHVLGQKFVVATLQKSLEENKVSPAYLFSGPHGCGKTSCARILAKALNCVQREASEPCGECPSCREIATGTNLNVIEIDGASHTGVGDVRQIKEEILFPPHGTRYKVFIIDEVHMLSNSAFNALLKTIEEPPPYVVFIFATTEVHRIPATVKSRCQQFHFRLVDTQTLVCALAQAAQQMQIAVEDGVLSWIARESAGSMRDAYTLFDQTVVSCAGPVTLENIQKKLGLMTDDSLAALFSHCCRKDARAALELVDALVSSGVSVEQCVIDCVRYARALLLFTQGITNESLVGIAANQVPEYVRTTWNASQIERALGLLLQLFRDIRFSVDPRYELELAISRLAWLSEYVSIQEVRVALDSVQQILDTHAVPGVCSASVGSDDGETGVVSPHGIRPPMSTSVCTVRALQDALVEKLRASHQMLATALGSSYSWREEDTSVCMCVRTHYERSVISQHASLLKEYASELLGREVCVRVLLDSVPSSKVAPSHLPQSPAPSALFTTSLLISGQECDRVSGDLPAQVKLLCDCVQGHVVRVYEGTARCVPGEGKIAGAVRTPY

SEQ ID NO: 76659 - protein, 637 aa, Treponema pallidum
MGIEYSASSITVLEGLEAVRKRPGMYIGSTGPNGLHHLVYEVVDNCIDEAMAGYCDRITVVLEQGNVVRVEDNGRGIPVDVHPHEGVSALEVVLTKLHAGGKFDKKSYKVSGGLHGVGVSVVNALSLWVEVTVYRDGAEYYQKFNVGMPLAPVEKRGVSEKRGTIIRWQADPSIFKETVAYDFDVLLTRLRELAFLNSTVVIQLRDERLATAKQVEFAFEGGIRHFVSYLNRGKSVVPERPLYIEGSKSDVLVEVALQYHDGYTENVQSFVNDINTREGGTHLEGFKSALTRVANDFLKKSPKLAKKIEREEKLVGEDVRAGLTVVLSVKIPEPQFEGQTKTKLGNSEVRGIVDSLVGERLTLYFEQNPGVLTKILEKSIAEAQARLAARRAKEAARRKSGMDSFGLPGKLADCSLKDPAKCEVYIVEGDSAGGSAKKGRDSKTQAILPLWGKMLNVEKTRLDKVLHNEKLQPIIATLGTGVGKDFDLTRIRYHKVIIMADADVDGSHIRTLLLTFFFRYLPQIIEAGYVYLAMPPLYRIAWSKKELYVYSDTERDEALESIGKKSGVAVQRYKGLGEMDGTQLWETTMNPVRRKMMQVVLSDAVEADRVFSTLMGEDVEPRRKFIEENAIYARLDV

SEQ ID NO: 76660 - protein, 356 aa, Treponema pallidum
MASIAILGGGAWGTALAASLTVNGHTVMLWARRRQTCDAINARNENVQYLPGITLPAALCASPDMAYVCAGADLIVLAVPSCYLAEVAALMNTTPRFQRLRTAAVGQEYPLIGILTKGFIPDQEGMPHLITDALGALLPSGAHGQLVYISGPSHAQEVAQGKVTGLIAASQNPMAAIRVRELLRSKRVQVYSSLDVVGVQVCAAVKNVIAIAFGLLDAMAEHSEAFGDNTESMLLAAGLNEIQTIGKQLGSTHPETFTSLAGIGDLDVTCRSAYGRNRRFGRDIVHKGILDSFSGIQDLVSRLPEVGYLAEGVVACMHVQRLAERDRLKVPICAGLYAILNREKGADTFMQEILGW

SEQ ID NO: 76661 - protein, 141 aa, Treponema pallidum
MSEVFPKIGRRRARILAFQALFAWDAAGITPETLTQFTWLRRNPPPSTQDLGFSRLLFLGTLEHLREIDGCVSSRLEHWDFVRLNKVDKAILRLSAYSLLFQKDIPPVVVIHEAVSIARDFGTDDSFRFVNGVLDNIAKSA

SEQ ID NO: 76662 - protein, 605 aa, Treponema pallidum
MSIPIRADQLRSRYLAFFSQKAHVVISGKSLVPEHDPTVLFTTAGMHPLVPYLMGEPHPAGTRLVNAQKCLRTGDIDAVGDNSHLTFFEMLGNWSLGDYFKEEAIAFSFEFLTGAPWLGISPDRLSVTVFAGDEAVARDEESAAIWERLGIARTHIHFLPRADNWWGPTGETGPCGPDTEIFFDTGVPPCSVSCRPGCSCGKYVEIWNDVFMQYRKDADGRYRPLERYCVDTGMGIERTVAVLQGKRSVYDTEIFTPLLERIGQLCGKRYGCQGAHDVSMRIVCDHIRAATFILGDPVPVRPSNVGAGYVLRRIIRRSVRHGRKLGIDGEFLSSLARVVIGQYAAVYPELEEKATCIAQELANEERKFLDALRKGEAEYERMIPKFLQGTEREIPGSVAFRLYDTYGFPLELTEELARESGLRVDRAGFDTAFQAHQACSRIGAQRVFKGGLADHSAETTAYHTATHLLHQALRVVLGTHVQQKGSNITAERLRFDFSHPRPMSAQEKVQVEQLVNEQIRADLPVCCEVMSLEDAMNSGAVALFGEKYESTVKVYSIGTFSREVCGGPHVARTGQLGRFSIQKEQSSAAGVRRIRAILEKSGEKS

SEQ ID NO: 76663 - protein, 504 aa, Treponema pallidum
MTTSIVIGVVLVTVGLTFGWTIRWLYARFHLSACEQRAERILQEAQKEAESKKKSILLEAKEYVLRERNQQERDDRDRRAELQRAERRLLQKEEALSTRAGELDSRERSLKQRDQSLCQEEARYRQELERVSGLTQNQARDLIIKNLENEAKHDAQALINKIEEDAALNAERRARDILVTTMQRITADVTGDVTVSTVNLPSEEMKGRIIGREGRNIRALETLTGADVVVDDTPEAVVISCFDPVRKEIARISLERLVLDGRIHPARIEEIVQKVTQEVSQKIYEEGEKVLFDLGIHDMCPEGVRALGRLYFRTSYGQNVLYHSKEVALLASMLASEIGADVAIAKRGALLHDIGKGVETDSDRNHAEIGMEMARKMNEDPRVVNAVGSHHNDIEPCCVESWLVQVADAISAARPGARREMVDHYVKRLENLEAIAEGFSGVEKAYAIQAGRELRVLVNNDKIPDRDVKALGRDIAKKIESDLKYPGRIRVTLIRETRVVEYAR

SEQ ID NO: 76664 - protein, 506 aa, Treponema pallidum
MDAHAITCASWNMLKAQLEAGAISSLQIVRAFRNVYEEDTRSASPLGALVEFFSDAEEHARTADNLRASCAQSTKTAGANGGSVSGKPLLGLPFAVKDNISVKGKHCTCGSKLLADYRAPYDATVVARLRAAGAIPLGRTNMDEFAMGSSTEYSVYGPTRNPRDRSRTSGGSSGGSAAAVAGGQAPFALGTETGGSVRLPAAYCGLYGLKPTYGLLSRYGVVAFGSSLDQIGFFATCIDDIALALSVTSGKDLYDSTSTCPPPATGRHAVSHHLAPFSAHECSILRAAVPRELVDAPGVHPDVSAQFQRFLTWLRAQNVQVEEVTLPALQAAVPVYYLVATAEAASNLARFDGIRYGQRGDTDALLENYYRAVRTSGFGPEVQRRIIVGNYVLSRHFSGDYYRTSVRVRSRIEQECTQLLCSYHFIVCPTAATGAFPLGERIHDPLAMYCSDLFTTFVNLARLPALSVPVGTSGTGLPIGIQIIGSQWQECAVLRLAKRWEEAPHV

SEQ ID NO: 76665 - protein, 509 aa, Treponema pallidum
MSDLQTGTVPSIAGATDDTHAAPFFYEVIIGCEIHCQLLTKTKAFCACANRSGGMPNSRVCPVCLGLPGALPVVSEEYVRLGVRAGLALGCTIQLWSAFDRKHYFYPDLPKGYQITQYDAPLCTDGAVDVQGVDMPVQRRVRIERIHLEEDAGKSLHAADAYSYIDFNRCGVPLIEIVSRPDLRSAEEAACFMQTIREILTFIEVTDGNLEEGALRCDANVNVRILYKGQEHHTPISEIKNMNSYRMVRDACTYEVQRQLQEFWQKGPASKEEMQRKRTMGWDPVEGVTLLQRTKHSLRDYRFMRDPDLPDLHLTPAYVQHLSYTVGELPAARRARFKLDLGLSAFAAQTLTGSRMLADWFEKAAHASKNARRVANWILSEVLAVVNEKNICIAELNLSPEAIAELMDAVEDQRITGKQAKDIFAQMLATGARAQDIISAQGLAQLSDEEEIATLVQTVFQEHPKALRDWQHGKTNVAAWLMGQVMKRSRGRAHPARVATLVHQALSQL

SEQ ID NO: 76666 - protein, 455 aa, Treponema pallidum
MAKKTERAFSCVGCGYVHPKWLGRCPECGEWNSFEETPSLSSGDVRAVKKASSSPVQAFPLCAVRAQDAQRISCGIAEFDRVLGGGAVRRSAIMIGGEPGIGKSTLLLQIAAACGKSVLYVSGEESPGQIRGRADRLNIPIQNIELLCATRVEDVERVLNTRCPTFVIVDSIQTVFSPEAGAIPMTINQLKYCANELIAWVKERDSVLFFTAHVTKDGNIAGPKVVEHMVDTVISFERNEEDIRFLRALKNRFGSVDELGIFTMGENGLSAVQDTAGFFISTRQGMFPVGSATVPVCEGSRVFMVEIQALTVPAKSSVTRVFSDRIDSARVSRVAAVIEKRVGLKFSDQDIYVNVAGGIRLYEPAVDVALAMALYSARQNTPVKTNAAFIGEVSLSGEIRPVRRLKTRLKTAYGLGFSTIYVPIGVEHDTPPPYTLRVVGTLAQTIAEIFSKAKA

SEQ ID NO: 76667 - protein, 129 aa, Treponema pallidum
MKNLGIGTGRRKTAVARVCIRMGNGNVTVNRRDVGAYFPTAEQLRRVREPLFATANERRYDVIVNVYGGGLDGQAGACAHGIARALVRADASNQASLRAGGLLTRDSRMVERKKYGQRGARRRFQFSKR

SEQ ID NO: 76668 - protein, 142 aa, Treponema pallidum
MRTIFVNEREAVRAWHLIDAAGRPLGRVAARVACLLRGKHKASYTPNQEMGDYVVVINAEKVFLSGTKPKDKMYYRHSGYPGGLKSVSFSALVKRRPVEPLRHAVKGMLPKGPLGRKLIKNVKIYAGSVHPHESQNPVPLSC

SEQ ID NO: 76669 - protein, 956 aa, Treponema pallidum
MTQKLQKIVLPPVYGPADFEARVYACWEQRQAFSPRARGSGTSDSEGCDGHSRQIEGGARTFVIAIPPPNITGVLHMGHCLNTVLQDIVIRYQRMAGACTLWIPGTDHAGIATQHVVERALRKEGIHKREVTREQFVARTQQIKDSHQDTIRMQLRKMGASCDWTCERFTLDAGMSASVREAFVTLYERGLLYRSMYLVNWCPRCGTALSDDEVFHQEKDGALYYVRYPLLPRTEEEGNGVPPPLGTAQVGETIIIATTRPETILADVAVAVHPDDARYQSLIGRKVCVPMVNRIVPIIADSYVAQDFGTGMVKITPAHDPNDWDIGTRHSLEAINMLNPDGSLNDQVPAAYRGLSCAQARIQIVADLQAHGLLSREERIVHSVGVCYRCEAVIEPYLSLQWFVKMKPLASQALAAWKRADVQFHPKKWENTYVRWLEHIRDWCISRQLWWGHRIPVWYCAQCAQQTVSRVDVQRCAHCGSADITQDPDVLDTWFSSWLWPFSTLGWPQETQKLRAFYPTSAVITAYDIIFFWVARMIMAGLEFTQTVPFRDVYLHGLVRDKQGRKMSKSLNNGVDPLHIIRTYGADALRFTLAFMCAQGQDVLIEMDSFKMGSRFANKVWNASRYILGNLEGRRVYAIAHVSLTELDRWIFHTFNETVQQVRTALEAYRFNDAAQAVYEFFWNSFCDWYVEASKCSFQKPDEQEKDRAASVLCTLLEETLRLLHPFLPFVTEEIYRSLSPSVHDTTQAIPSGAHALLMCAPYPVYVPSRVDARACAHIGAVQEIVRAVRTLRAACGIDPQKAVSVRLRPSSPAQDANAAAQVSCVHDPGAVARTYEELICVLAGISSLVYLESDAPKPQVAVATAGTGFELFLVTTEGIDRTMLCARLQKAWQKARQKVQQVERKLADAQFCTHAPEEVVTAERKKLAEARATCHTLAGYLADMNGKPGPLSDSD

SEQ ID NO: 76670 - protein, 792 aa, Treponema pallidum
MQVSFVVHGISCTACVRRIEEAVRHVTGAYDVYVNPTTSHLYVHTDLHPTEHTLFAQTIIDAVSHAGFKATLLDTHSTTAPLAATQPVHPDFVTLKRRVRTSLCLLVPLMYLSMGHMVHLPIPGFLHPLKYALSFALVQAFLTLPVLYANRSLFRAGLIALYGAILRRNTATMDSLISLGSLSSFTYGLFATARIAMGVHANDTALVSHYVADLYFESAAMIVTLVTVGKYLSALSKGRTSRALTQLLDIKPKTARVIRQVSVPRGASPSSPTTASAASAHETHEIEIEIPAQDVLVGDTVLVKAGELVPVDGIITSGQATLDESNVTGESIPVEKGRGDSVISASLVSTGFLKFRAERVGEHTTLAQIISLVEKTAASKVPVTKLVDAVSAYFVPSIVALSLLSGCAWLCAGASAEFAFSIAVTVLVISCPCVLGLAVPTALMVATGKGAQMGILIKSAQVFQQMARTKVIAFDKTGTLTLGRPTLSHIHTLHPTYNEEDILHLAYSLEVCSGHPLAAAISVAAQRKGMTPLAITDFNSEQGLGLRARLVHTSYAKTVMVGNARMMVAHSIDGMDTYLSPSHNLEETPLFVAADKNLVGVLFVSDPVKVHSSAAIGALHKRGIQTLMLTGDVKHVAHTIAARCGVKKSKAELLPHDKEREISALKASGMMVAMVGDGVNDAPALASADVGIAIGAGSDIAVESADVVLMRNCIRDVVTLVDLSIATVRNMKQNLFWAFFYNTLGVPLAAGLGYPFFGLRLTPMLAAAAMSLSSVSVLCNALRLNQFQSSSP

SEQ ID NO: 76671 - protein, 238 aa, Treponema pallidum
MEKIVNADGSDAICPASAACAKSIRSYQESYSLGEEIANAVTHGIGVGLSIVALVLLVVRAVHYTPADLTARYVVGFSVFGSSLIVLYLCSTLYHALPRGAKYVFGVIDHCCIYVLIAGTYTASCLTTLYGAIGWTVFGVIWGLACSGSVIYSVFGHRVRWLSLVMYIAMGWLVVFVAKPLRERLPEISFLFLVLGGVLYTVGCVFYALKRIKWTHTIWHMFVIGGSVMHFFSLYLSF

SEQ ID NO: 76672 - protein, 177 aa, Treponema pallidum
MNMCTDGKKYHSTATSAAVGASAPGVPDARAIAAICEQLRQHVADLGVLYIKLHNYHWHIYGIEFKQVHELLEEYYVSVTEAFDTIAERLLQLGAQAPASMAEYLALSGIAEETEKEITIVSALARVKRDFEYLSTRFSQTQVLAAESGDAVTDGIITDILRTLGKAIWMLGATLKA

SEQ ID NO: 76673 - protein, 351 aa, Treponema pallidum
MDTESVLFRAQCLRAVRDFFLEHHYIELDTPALARALVPERCLEVFQTEYFTSVHAKDTQKLYLVPSPEVFLKPLIAQLQRSAFQISKCYRNGESMGALHRPEFTMVEYYTVYADYKTSLDVSSKLFRFVVEQVQSHPLADPYSCACFCAPFEYVTVEEAFLRYAGFSLSHASSVQTLAQEVLRSGIDLGARAGVDYTQWSWDDLYELLLVHIVEPKLRSIKDRCVVLYDYPIQISCLAQEHTGRSGIQSTSPNKGDAPHWVVKERWELYVRGVELINCYTEQRDAKHVTRYCREEQTAKQGSARVVHPVPEGFAHACARMPPCSGAALGFDRLVALLAGRHSLDAFVYDQ

SEQ ID NO: 76674 - protein, 457 aa, Ureaplasma urealyticum
MANNYQTLYDSAIKRIPYDLISDQAYAILQNAKTHKVCDGVLYIIVANAFEKSIINGNFINIISKYLSEEFKKENIVNFEFIIDNEKLLINSNFLIKETNIKNRFNFSDELLRYNFNNLVISNFNQKAIKAIENLFSNNYDNSSMCNPLFLFGKVGVGKTHIVAAAGNRFANSNPNLKIYYYEGQDFFRKFCSASLKGTSYVEEFKKEIASADLLIFEDIQNIQSRDSTAELFFNIFNDIKLNGGKIILTSDRTPNELNGFHNRIISRLASGLQCKISQPDKNEAIKIINNWFEFKKKYQITDEAKEYIAEGFHTDIRQMIGNLKQICFWADNDTNKDLIITKDYVIECSVENEIPLNIVVKKQFKPEQIIEIVAKELNIKTDLIKSSIRKNNIVWARDIVCYILKNKLNLTLTDIGKLLNGREHTTISHSISKVQKILDDENSQEALQINLIINKF

SEQ ID NO: 76675 - protein, 359 aa, Ureaplasma urealyticum
MEYNKKLYEAIERVAIKNDALKKELETVVTDFKKIKEINIQLKKTTKIAEAFAKYKQKLDTGIAAEKILNTEKDLELIELAQMDLDEAKINIPIIENDLKIMLLPTDPNDDKNVIVEMRPAAGGDESSIFVGNLFDTYRAYAENNNWKMKIIEMTPNAVGFSFISFMISGEEVYSRMKFESGVHRVQRVPATESKGRVHTSTITVAVLPEQDEVDVVINPTELRIDTYRASGAGGQHVNRTESAVRITHIPTGVVAACQEGKSQIENRETAMKMLRAKLWEAAQEQQNAEFANLRKNQVGTGDRSEKIRTYNYPQNRVTDHRINLTLNKLDQIMMGELDEIIDALIADEQTGLMANLDI

SEQ ID NO: 76676 - protein, 154 aa, Ureaplasma urealyticum
MIKKIYFGNDHAAYEIKDQIITHLKQKGYQIIDEGAQAALGSVDYSTYALKVANDVVNDTKNDSIGILLCGTGIGMNIAASKVHGTRVALVYNESSAKLAKEHNNANIITIGARENSLNQILKMIDDFLTSKFLGERHQKRLDIIAKYEKEQNS

SEQ ID NO: 76677 - protein, 540 aa, Ureaplasma urealyticum
MENKQSTLNLNNNTNINQNFLTQNILKTYEHKDITGLKKLLKSKRIDKIVESLETINDTQIILFVLVATKDGICGDIFKYLNTELKSKIINDASLQQLRIILFELYNDDVIILKNDFPMYTKKILLSLDSQQRAAIKQLSEFDEDEAGSIINSDFFTINQNLSIKEALIEIKRMYNDFEQSNIIYVVDNYNRLKGYVTIHSLLFADSFELKISNVIQEDVFYVRSDEDIDAVLDIFRKYQIEQLAVVDKDNQLIGYISDNDILPVINAETTTDIYKMYGISELDFPYIKSSVFVLFKSRLLWLAVLMISATCTGFLIDKFQDVGQLVTAGLSTLVIVPIIPAMTGTSGNAGSQAAASVIRALSVGEITLKEYNKVLAKEFLVGALIGLVLAIINFARLIIYFAIIKPDLQQYNVLYENITNNPHTKMIVGAIVSAGSSVALFFAIVISKLLGGTLPLLATKLKIDPTIMSTPILSTLLDMVTTIILFGFGIIFLLIIVDKVKVEQLNNIREHIHAIKNVNSWLPNQNFLLNNLNYSKHFA

SEQ ID NO: 76678 - protein, 166 aa, Ureaplasma urealyticum
MANVRPSVVFKQQEVNHMADILKNSKSFIVFEYHGLTAANILALRNVLHSSNSKLYVLKNNITARAFEKAGVSGFENQLTGPNAVAVAMDDEIAAIKAVNDVAKEFDFVKIKGAYLENKFADTHKIDQLAAIPGREGLYSMLLSCFTAPLRNVMYGLKAVAEQKGE

SEQ ID NO: 76679 - protein, 121 aa, Ureaplasma urealyticum
MSKLTIEQFIAAIKEMSMLELNDLVKAIETEFGVSAAAPVAAAAAPVAAEAPTEVTIKLVEAGTNKVGVIKLIREITGLGLMEAKTAAETAGSVIKEDVKTEEANEIKKKFDELGAKVQLV

SEQ ID NO: 76680 - protein, 736 aa, Ureaplasma urealyticum
MLKFKTLLSYDSFLKGQERKTITKKFLSTVFAIFVAIVVSAILVGILGYNIRDFFIRLFTKWIGSPDIYLTKVAILGIAALSFIFAFKAGLFNIGISGQMLGSGLIMLLVVKNMQIANINMPNVLGQFFLLIIAMLAGAMFAVFIGILKVFLKINEVVSSILLNWIMFYITRYVVFTAQSKMYNPTPDQVGSRSIPFADNYSLFHLASGYGYLFALLIFISLSIIIWVILKYTVFGHKVLSVGKSFDAAKYAGYRTKIISLATFAISGALAGALAMVNYTSTTTNAIVISQAADALPTQGYDGIAMGLISLAHPLATIPVSFLMGLLQQSADNLGGSFPQDLSGIIISFVMLGAAMFILFERISPVYWIYHLIYTYKGKDYYRDYENKNNNIISEYKAIYSEINKKRNQYLQELKKLRKELDQFKNHEQYNKVNQQYEYTISYIKTTYNAWLKVEYDKYLKQLKNNAMQLKKHLIIERATLVYYPEINTTRKIKNKLKHFENISAKKLSRIKDKIHNEDFLIKNLVAKEISKYAQSKSFDYNKLKYLLQEYENNNSVLTTELVNELSLVLKDEQAQLMFSEFKQASFENNLDHMIDLKNQIMTYINSLLDSRLEQLSITLKSKNLVHDEQMDKIILLLNPNDKILNKIIISRNKHLENYTKEITKLELRNISQDDEIKKNTKQRSSSYLTKHYEKTKQHINKINLDQEQKLLLEDWLTTAYQKAIINQQNMKEVIS

SEQ ID NO: 76681 - protein, 265 aa, Ureaplasma urealyticum
MLEKIKIIDTHTHPNIEPLIEEFDDIIFKCYEQGIGLNIVGVDLKTSQTAIQQAKKFKFLTCSVAIHPNDLHNIENDFVALEKLIAENIDYISCIGECGLDYYHEQNYDHDFQKHWFKKHIELAKKYHKPLMLHIRNAHDDAIAILKELAVQDVIIHCFTDKKEYAQQYIEMGYYISYPGVITFKPTKNNQLHELYEAIKITPLDKILVETDAPYLTPVPKRGQTNYPYYVLYTSAFIANLLGITHEKMQKILLENSLRILNFKK

SEQ ID NO: 76682 - protein, 438 aa, Ureaplasma urealyticum
MSTIVALATAPMNCAIHIIRVSGPKAFEIINKISTIKIKKETFKIWYTILKDDNQILDEVLINTFVAPKTFTGEDLVEINCHGGIVVANLIIKTLIKYGCQPAQRGEFSRRALLNKKMDLSKIEAINNLVNAKNELSVKGVIGALLGRVSQSIAEFRHELFMIIGQIEVNIDYPEYDDVEQVDAIILKQRLLSLDKKITKIIDQSKKFLPINKGIRVLIIGKPNVGKSTLLNALCNEQKAIVTDIPGTTRDVIESSINIDNITLNILDTAGIHLTNDFVENLGINKAKALIDKVDLILYLIPANEQQDLELYDLIKKQKHLLVYTKKDLVDQYDDKQIYINAKNNDIQSLIDEIKKLFYVQEFDNANIDVLQSQRQIGILENVHYLINNAILNLEKGDTLDLIVADLEFCNLRLNELLGISSEYDFLDDLFKNFCIGK

SEQ ID NO: 76683 - protein, 233 aa, Ureaplasma urealyticum
MITMILTKNSNEKKPLKKGLFIVFEGIDGAGKTSILKQLLEVLKEPKLVNKIFLTREPGGKNNNAAEMIREFFLKNLEVFDPLTLAYLYASSRAEHVKKTINPHLEKDHIVISDRFVHSSYIYQGIVQNQSLDVIYQINQQAIGELEIDYVFYFDVNVNNALNRMKNRFDNTNAFDSQNKQFYEKLLKQYPSVFKVYNQPKKIIFIDANKNENEVLCEVKEQLLKIFKEHKYI

SEQ ID NO: 76684 - protein, 289 aa, Ureaplasma urealyticum
MIMELIKTNTLNFYFEPSKSELKKGSIVFIHGLDASPHYFFLINKDLSDYDCYFVGLPAHGLTPINNKKDLNIKVFAELFINWINEIDLKEFHLLGHSLGAGIASLVSFIIPQRIEKLILVCPYHYQYLNPFLNKKLFNAWVLFPNPFLKFKTDVVLKKLYIDYRNNYKTLIETRWESISREYPRIARDVLFLCLSLLNIKINHELKMAQRNLIMPTLIMVSRHDQLIDFNLAIKVFKNNNKVNQYIFNNSGHIPFIEEPKLFTNILLSFLEDRFVEQEENDNNDINEK

SEQ ID NO: 76685 - protein, 470 aa, Ureaplasma urealyticum
MVLIMKISFKFRLINVISMLGLSIIFTTLSSCKNLQQQKPYDTNWLFKNKNWRLNNFFRDPYKIHLEFARQLDNVLNFNELKKRLPKPMQNVHSFTEWSLKIARLLKNDINNVAMLDSIQKMRNHKATVLVIENRNELVNNKENYNKFSILTPSDFPLIYSNPYTEVPGLGLNFPKPINNDISDIIDRYQSIGYNALRTNPLESVLKQTSSFYKTADYVFYMYDSNLFTNNKYKTDGQKREDLFKEILSNKNFYAHKFLRNSRSKIIFIDRSLFWWGSFTMVGQSLIIKELLKIFTNKKTIKKQWSYLPFNKEELINLFDHKPTIKERNLIIKPHYINKNFKLTYGYKIVGTWADSIDHLISFGLKPDAIVDYESFNNINLKTQGVGNYLKELINYDKLEKINKAPNDSEKAEFVDKNFAIYMGPSHLLNSMNKLIMIKNTGSWIISSTQGINDPKTQFKTRINTAKSDF

SEQ ID NO: 76686 - protein, 349 aa, Ureaplasma urealyticum
MSQMENSTKKVESVANVEVVTTENAKVEQKPTSPADAIQLKVNANSTIKNLKTLVSIVKLTESGAHIGLNPKKWNPKMASYIHAKRSNNHVIDILKTILFLDRAYKFLQEVSQNGGTVMFVGTRGRVVKELIKAEAERTNSFYVTQRWLGGTLTNFTNISRSLKKFNSNLALLESEEINKYSKKEQIAINKETAKLEKFYGGIKNMKQRPDVLILVDPVNDVNAIKEARKLNIPVIALANTNADPQLIDYIIPVNNYSVKSITLILGVLADSIAELHGEPTKIVGRPDSEIVLPETKSNWKQNNYDPSKRGYNPKYVNHKSTFNKFNNKKPVDSTTNEIKTNVIKAETK

SEQ ID NO: 76687 - protein, 706 aa, Ureaplasma urealyticum
MIDLIIKTLVQKLKIEAKYITNVLNLLADNNTIAFIARYRKHLTNNMDEFQIQAIAHEYEYLTKLNKRKEVIIKNLEQKGLLTNDLLELINNCQRLVDLENLYEPYASNKKTKASIAIEKGLEPLALLILKNNPNSNIKEVAKQYLNEQVLSVDEAIAGACDIIAQKVANDTTLREMLYETINKHAKLITRINKITNDPTKNFALYYEFSCPIKYLKAYQLMAIDRANELKIIAFKLDFKKEFLIDFAVNKYTRKIKSNSYDYIKSAVNDGFDRLLIPSVSNAVYKEKLEEAHQQSAQIFSNNLQQLLLQKPLKSHVVLGFDPGYVHGCKLAIVNKNNQLLHTDIIYPHKPQILITQAKNTLISLINKYEVNTIAIGNGTASNESVIFISDLIKEFKLNLNYCVISEDGASIYSASSIASEEFPNLSVEKRSAISIARRIIDPLSELIKIDPKSIGVGQYQHDINKNILQQKVDFCIDYCVNQVGVDVNTASIPLLSKVSGLNKRSAKKIFEYVKKHQFIENREQLKTIPYITDKVFEQAAGFLRINNANNFLDRTSIHPEAYLVVNELCKYLQLPINKLINNYQVLNQLNPNELTTILKTDIYTIENIINNLKNPLQDVRDDYDIPILRSQMVDINNLKIGMLVQGTIRNQTEFGSFIDIGLKNDALLHISNYCEEDNLHVNKNINVYIDKIDTITQKISLKLKL

SEQ ID NO: 76688 - protein, 747 aa, Ureaplasma urealyticum
MNLKTKFFLKVISVIAPIVIIPTILANCAHINSNELDNAKTNLKGSVEVVNINPYKTKQMLASNINKEQINSYFIFIFNLIKTNQKIEEKILDKNDYEILNWAANDNDGTLGINIYIKTTKQSYLINTKPVFLTDKQNNYLQELKYKTPAVYSIDEILKFSNNPYNLIHNNPYYREQLLRAKIYFNQNEANVDDSKLYMNKIGYSEFGSDVQKRLENAFKIRYDEQNIYQINSPQILAKETKTLTSYIDKKTNNNYSINIELIKKLIQINPFGKLPKNFAQLINLIKKEEYPKFLTITKNESVDNIVVKDIYYRIIDRYAKLEFILEIYNKKTKQTVYLSANFNQKNSGLLKNEDYFQYIFDRTISLDLLTTKDGKNVELNSGTGWIVDRIIDDSLPKNKIKLLIATNNHVMGWSNLAISKDNRMKSRWFNKQEYINYLENNAGFISSNIYEDKDRYQYLLWGTAPLKSPVSNKYNSLSGISFSNLAKVYNITNQNFINRAWYIPQLSANGIKINENLRTWYQINQEDIKSIKNGTLDFVLVPMVFDIEDIKEKLPNYYKVLNTKDEANWYIGLGNSKKYLPQLQLFSGGYPGDVNPNSSAIVSWRGSKSYGSLIQAFDREIKNESILDYYGPKQINNIDGYQKVGEGYLNKLFNVGTRVITSDEIGDLGSGSSGSMIIDSNFNLVGIHFASLNSRAYGAPNDSMIGNLFVAQSQDLSGDIDVRAAVIKKLKAENIYTYKLNPKVSS

SEQ ID NO: 76689 - protein, 254 aa, Ureaplasma urealyticum
MAIVAKINGNASEWYHAPIALAFFLRFSLINKIFAIILSCIFCVSIYRFRKKLVQYENFNEIKSIKNNAILTVIFSVVAILSLTLFINLMIVFINQNYYYIKRIHNLLIPIRIDEIKILEYSYIYLLRCGFYILLTVFIAKFIHDKRSMIKVLSLYLFVNFILMIIGTSFTFLEHTNFYNGMLTYWTTFSCGLLYPEIINDNFQWISSFNYNLKNTIYENNFIAYLPYFCSFIVLIILIKKVSWKSITISSNSY

SEQ ID NO: 76690 - protein, 614 aa, Ureaplasma urealyticum
MKKYDVIVIGAGHAGLEAAFATSNLNLQTALITLDEKGIGMMPCNPSIGGPAKGIVTREIDALGGIQGKAADATTMQMKILNSSKGPGVWAIRAQIDKIAYQRWFKQQIKQQKNLDLIIAEVSDLLVENNIVKGVVLSDQKIIQADYVIITTGTYLKSITHRGSVCVDEGADGTKNAKFLSDALVKLGFELIRLKTGTPARIKKDSIDFTNMILEPGTNQKIAFSHYHPVYKPYDEQLPCHIIYTNEQTHQIIRENLNKSAMYGGMISGIGPRYCPSIEDKIVKFSEKPRHQIFVEPESYELDSMYLGGFSTSMPIDVQEKMIRSLPGLENCEILKYAYAIEYDAIDPTQLYPSLESKLVNNLFFAGQINGTSGYEEAAAQGLMAAINVNQKYQNKEPVILGRDQAYIGVMIDDIVTKGVVEPYRLLTSRAEHRLALRNDNADDRLMKIGFEIGLLKPEVYDQYLNNLKQIKEILNWLKTTTVGQIDDLKFTTLKTNSYLIDYLKRPEIKLNDLLIYCPIKIEDEQIINKVQIQVKFEGYIKNQEENLKQLKRLNNIKLHAIVDYKEVPNISLETIDKLNKIKPLDLEQASRISGVNLTDIAMIKYYLERIKND

SEQ ID NO: 76691 - protein, 214 aa, Ureaplasma urealyticum
MSFEKYKTIIQKYNQIFNLTRLDSDDKIYQNFFLDSLAPYKELDFFTQNTNLKLIDIGSGSGIPGVVLKIIFKNLNLTLLEANQKRCEFLKILTQELGLNDVLIWNMRAEDLTQSMRESFDIATSRAVASLDKILEISAAFVKVNGYLIQPKSIKFYEEELKAKNIIKTLYLERIALKDFWENDYHHLVGVYLKKQITPLQFPRPWNLILKKPL

SEQ ID NO: 76692 - protein, 304 aa, Ureaplasma urealyticum
MQLKDLINKKKNLNNINLKVSNERNIFLINIMKLNQRLTFFSKNAFEIKESILSLKRIYNIKHDMLRHEERKIFKFLNKINDRVLWIYLTEEQKYSTDSYSRYEQKILKTIKSNRDDFILIGQGAIEFGKNHNLNVLQTFNDSNIKNLTTQLTKMIMILYTFDNYKKVNFVINSNKNYDGHFTILPMNEFSFDKFINLQKCDSNIIDFQKVKIYPNLNEFINVQINVFLVNIINTLITESSFYKTKNGLVATNNILKELDDNLSKIQRKITRVKTELQIEEINLLARQNMNEDDNDNDGGVYES

SEQ ID NO: 76693 - protein, 141 aa, Ureaplasma urealyticum
MIVSNKHARRNYELLDFFECGIVLKGTEVKSISRANCSINEAYVQIIKNQALILNMHVANFFEGNNFNQDPYRNRKLLLHKKEIIRLQHLVKTQHMTIVPTKIYWKNNKLKIEIALGKGKQLHDKREDIKKRDLARETRLF

SEQ ID NO: 76694 - protein, 598 aa, Ureaplasma urealyticum
MSQQLQTNKPVSKLYLIYYYFKDFKKVFIGLSIAIIFWLSTTIAATFLLQETVDKYAIANGIVDTVVKMCAGLIGIYFFSFIFLLIINEFAIRISFKIESHLSMMVINRIRYLPMKYFDINKSGEIFTKTLSDPTSVQDGIVNFYIELNKAIFGAIGFGTALLITSPYIALIGIVIYVLVMLFNILIFKKSHQLMRIKRQNFGEMNGYIEEMIYGQNVVANFNEQVFFIKKLDNMIKKLYKNWIKAQYSSQIIFPWSIFSMRLMNAVLIVSYLLISIKGIHLPGLINNIDPTTNIISFGGLVSISLFGNFFCDNFSQLSNTIPIFIVARTSLAKIDEIVKTPNEINWNEKLIIDASQGIEVRFENVNFNYLKNTPTLKNINFVAKRNQRIAIIGPTGAGKTTITNLINKFYDINNGFIYFNDVDITNKSRESVREHISIVLQDPFLFSESIYENIKKGKMNATKEEIIAAAKKAQVHDLILSFPKDYATVIDEKQNLSQGQKQLITIARAIISDAKIIILDEATSSVDTQTEHKLQLAINNLLKGRTSFIIAHRLSTIINSDLILVIKDGEIIAQGNHDYLIKNSPFYQELYYANFNE

SEQ ID NO: 76695 - protein, 493 aa, Ureaplasma urealyticum
MERKFSDQELIRRTHLQELKNQNKNPFLITKVDRSMFLKDFAEKYKNFSKEELHNMDLEKLTLAGRLIGIRQTFGIIQDFSAKLQIYINKKNVAPEVFSTFKSLDIGDIIELEGVAMKTNSDEITLNVTNIRLVAKSLKVLPEKYHGLVDEEIKARQRYLDLIVNDETKNTFIKRSLIIREMRNWLDNKGFFEVETPVLQDILSGAAARPFITHHNTLNKEYYLRIATEIALKKCIIGGFEKVYEIGRIFRNEGMDSTHNPEFTSVELYIAYVDLWYIMQLTEDLIRHIATKLNLLNPTFRGFSIDLNKPFKKAHMVDLINEYVGVNFFEVKSDEQAIELAKKHHVKLLDHQKNFGHIVNAFFETFVEEKLVEPTFVYGHPLQVSPLTKKNQSDPRFVDRFELFICQKEFANAYSEINDPIDQYERFIAQLEEAKLGNDEASELDMEFIEALEYGMPPTGGLGIGVDRLVMLLTSNDSIRNVLLFPHMKDKTK

SEQ ID NO: 76696 - protein, 293 aa, Ureaplasma urealyticum
MLSSINKLKNKLKNLAKKPIKVLFIEQSLEIDKAKKMLSQDTLINIVDLSSFKTPEIINECEEIWYELRKLKGESRNDAQIAVNDNLNFAVCLSYLKKIDVLIVGANLSSKTCFSSILKILKNPNGSIAYSTMVMINKRELIFMSDCALNLNLNKQQMIDAAKYSCTISRNYFDVLNNHVGYISYLSQNDVIYQNKNFDFIGPIQFDAVVDLKVRNKKVPNIHQYHINHYVFDNISIANTVFKIYQTKLNYLTVGTYISNILTKVSVISRSASSDEIIATTYLLCVAFLTDLT

SEQ ID NO: 76697 - protein, 291 aa, Ureaplasma urealyticum
MFKIFAKYFCNHQLDRNQIINASKNDALIINNLSYRYHKKLPEVLKNLSFSIKKNSFTTILGPNGCGKSTTAKAIVKLLKLKKNIIKVFDRNINELSFKQLAQLISYIPQSIEIPQGTRVIDFITFGRNPYLGFSGILGKEDKLIIDLVINEMQLHDLKEKFMQELSGGQRQKVILALCLVQDTPIILLDEPTTYLDIKNQYELLESLKKLQILRQKTIIAILHDINQAIQYSDEVFVLKNGQIYANGNPNEVITKELLKNVYNIDAQIDIVDNQKIVHKIKVKDYLSNSE

SEQ ID NO: 76698 - protein, 356 aa, Ureaplasma urealyticum
MKINQKTNLKQKHFYLIKNLNYKQSVIIKMAGLILIAICFVFLTLAIYFDTTNGFEASINQFNFNIRGPKTLMAFFSGGAIAVAGLLLQKVTRNHLADTSVLGIGSLNIILMTVYLILIKDKTSSYLNPEMRILPLVMFLSSIFGTSIVYTLSKLGRANNEKFIIIGIALNFLFEAISVVLINPANNSLFSNQDKNLMIAFENIKNYTLGIIPNSQYIDLSLVISCSVLIALTLIPIWFLRKKIDLYETSAALASTTGINIERLKISIYLLVALLAGLEIVLVGYIALLGVIGASVARQLFGNRTGITMFAAFLIGATLVCFALLISVNFNTQVPVGFLSTTIITPYFMYLIVRGK

SEQ ID NO: 76699 - protein, 330 aa, Ureaplasma urealyticum
MPKSTLQEIIDNDSNKFTFSEFVKEDIYTNTDYSSTDYKVILYSFFRNNLTIKIGQKLTWIIKSQNLQIIEFILNGLDYFNNLNIEYEIMFEPDHLNKTRTNYSLLLWGDLDKLDEILKLFDDANNENFHKDRYCSNFLIGAMLSGGSIAHPLENYHLEIRCDSNNYIPLLTKALARYGLEYKIIYRNKKTIVYFKKSEIISDFLKAIRTQNSLFEFENIRIQRDFNNQQQRLNNLDISNLSKSSKAGVLTKEMILEIKKNHDEFCKQSTKFLKYCELRVQNPDCSLNELSCLLKQMFNIEISKSGLNHFNSRIKEMYEELKLKKLVFKN

SEQ ID NO: 76700 - protein, 308 aa, Ureaplasma urealyticum
MEIRGKLFVSQVVRKFNLNVVANSDYIDREISTTGITRVGFELAGEILFKEIWNIVYFGSKESNYFNKFSETIISKKLGKILDLNPPLIIFGKNFKHAGILLKLAERYKIPIVEVKYSFYELNFTINSYISQKLSHQSLVHGTLLSVFGIGVILMGESGVGKSELAIELVKKGHIFVGDDAILVNRIGGNLYGRAEDSTKDFIEIRGLGIMNFSRSFGIERMIESTKIEIVIELIKPAKHEKIKFERFGREIQHKEFLETKIAHYYIPVIEGRSISDIIETAITDYKLKTSGYNSAEEFILQINKKGI

SEQ ID NO: 76701 - protein, 333 aa, Ureaplasma urealyticum
MKILIKLWTNLINRISNKKYLAAVSGGPDSMAMLNMYKRNIRVVCHVNYHKRESSDRDQQIVVDFCRKNNLIIEILDVDEKVYERYGHIDNFQTKARLIRYDFFKEIGKKYNIENLYIAHNFDDFLETAYMQRARQSKALFYGIKESNVINGIIVKRPVLFVRKQTLQRYCDENKIKYGIDETNELDIYERNRVRKIISSWSLNEVYDFKKFVIKYNKEHSSFANFIDLSYIEFKKNKYKYDYFIRQDDMVQYYLIYYFLIDHKIINPSENKIISLIKFFGKQINKEKAYRVQENIYMHVNDDELISLISYNKSDNISNSNVDIIDDHNVIEK

SEQ ID NO: 76702 - protein, 379 aa, Ureaplasma urealyticum
MEVFISIKKLIEAIKFSTTIANTNNANALLLGVLIEVSQNKISFKTTNNQVSGYKEITEGFEYFNSGKVLVTAKIILGLISKLKDKSVLLKQIDTNILLIKTENFETQINTMNIEGFPNLNFSLEDYVKISLPHQIMQEINTKVLPNVLNSQGIEKIQPISGILIDTQTLENKLIAIGTDKIKASCLIREYMGEKFKFIVSYSTMKLIIEILKNVEYSNNQTVDFYVRSRSLIFKINDAILQTRMIDGVYPNIYSIFDETNEENTYVFDRRLLIEIIERGMNIVMQEQNPKISIRIDKNEAEISLTTFEIGNMKEKMSIVNLNNKSAEFILNPSLLAHVLKNFDNNDVTFKVKDEILRPIIFIDTKDVGFKQILSRIKN

SEQ ID NO: 76703 - protein, 650 aa, Ureaplasma urealyticum
MNDSNKEKKYTAESIKVLEGLEAVRKRPGMYIGSTQSEGLHHMIWEIVDNSIDEAMGGFATIVRVILKKDGSVRVEDDGRGIPIEIHEKTGLSGVETVLTVLHAGGKFDNDSYKVSGGLHGVGASVVNALSKNFKVWVNKNHVQYYVEFINGGHAIEPLKPINNKDVKEKGTTIEFIPDFEIMEENEWDELKIMARLKQLAYLNKGVNIEFESELTNRKEKWHYEGGLKEYITDLNAEKEPLFDLIVYGEEEKEVRVPGHNEQTYNIKCEVAFQYNNSYNNSTHSFCNNINTTEGGTHEEGFKLAITRLLNKYAVDKKYLKDTDDKITKEDVSEGLTAIISVKHPNPQYEGQTKKKLGNSEVRPYVNEITSIIFEKFLNENPEESKKIVAKVMQAAEARRRSHEAREATRRKSPFESNSLPGKLADCSNRDSSVTEIYIVEGDSAGGSAKTGREREFQAILPLRGKIINVEKAKIDKIFANEEIQNMITAFGAGIGPEFNIEKLRYSKIIIMTDADVDGSHIRILLLTFFYRYMLPLIQNGNVYIAQPPLYKVSYAKTIKYAYSDQELERIKSTISNIKYNIQRYKGLGEMNPDQLWETTMDPKNRLLLKVNIEDAAIADKTFSLLMGDDVAPRKEFIEKNAKYVKNIDA

SEQ ID NO: 76704 - protein, 840 aa, Ureaplasma urealyticum
MALKKPKKSRLTTEEIKQQLEGSTIKEQSITKEVETSFLDYSMSVIVARALPDVRDGFKPVHRRALFAAFENGMTHDKPYKKSARWVGDVIGKYHPHGDQAVYQTIVRMAQDFSMRYLLVDGHGNFGSIDGDSAAAMRYTEARLSKISYELLKYIDKETVDFVPNYDASEQEPSVLPSGFPNLLTNGTTGIAVGMATNIPPHNLTEVCQAIKAYAKNHNVTISEIMEYLKGPDFPTGAEIYGDSGIIKYFNTGRGSVTIRSKYEIEDIGQGRVAIVVTEIPYMVNKANLIEKIVELVTNKQIEGISDLRDESSRDGIRIVIEVKRDVIPEVLLNKLFKTTPLQTNFSVNNLALVNGVPMVLNIKEMIKYYFEHQIEILVRRTNFDLKKAKERIHIVEGLVIAVNNIDEVIKIIKASGDDDIASKSLIQRFDLTELQTKAILEMRLRALTGLNIDKLKKEYEDLILVIKDLEDVLNNYNRQVNIICENLDYLIEKFGDERRTEIMYGVSSHIDDEDLIPVEDIVVTMSKRGYFKRLPIDTYKNQRRGGVGVQGLKTYEDDDVEKILVANTHTDLLFFSDLGRVYRLRGHEVPLGSRQSKGIPAINFLPIEKSESILTILPIDNYDQGSLFFTTSKGIIKRANLSDFESIRANGKIAITLKDGDKLFSVMQTLGNDEVFIGASNGNVIRFNENDAREMGRIATGVKGINLENDEYVVGTGLSSHGEYVLAVGSKGLGKLTDINDYRLTKRGAKGVNTLKVNDKTGNLVSIKVVNREEEALIITTSGKVIRLSIKDISVIGRNTSGVKLISLENKEEVKSIAIFKKEEINDEQLLQENDYNLK

SEQ ID NO: 76705 - protein, 334 aa, Ureaplasma urealyticum
MKENNNLEKLDPIATLETKFAKSSYFIADEIKDEKINAISTGSIHIDQITGINGIPVGKITEIYGNESSGKTTIALQTIAECQKTGGTVVLLDLEGSFDINYAKSLKVDLTKLIITQPQTGEQAFDMIETLIKTNSIDLIVIDSVAAMLPESEYQANMNEALMGAHARLMSKGLRKIQPLINKSKTAIIFINQLREKINTFFGNPEMTTGGKALKFYASLRIETKKADLIKEGINKIGIKTKVTTVKNKLAPPLQTCFIDIFFGSGFDYNNEIIDFAIQYGVLKKNGSWFYFNDNKIGQGREQLKNTLSKNNELFIQISEKTLEFVNNEKSNWQ

SEQ ID NO: 76706 - protein, 473 aa, Ureaplasma urealyticum
MGYLIAFIILLILFVLLITIVPVVMVVYLKKKQLKLTFVPKSQTSFKKIVQKTKDLEEECEDLNNKNNELKKAISDQNLQIDLLKKNNENFLLNATSLTAEQAKKELFNLLKIKFKKELAQEYAKIKHEFNEAQEIYAQNILVETMEQIAEPLIVERSLFNIDIIDENLKGKIIGRDGRNKAVFENEGGVDLIVDRQQPIVGISTPNPIRREIARIVMQKLIDSKNIDINRIELLFKEEREKFEKKVFEIGKNVVEQTLGFFDLPEGIYSYIGRMKFRNSYGQNILSHSLEVAEYAERIAKLINIDPIKAKKAAFFHDIGKTIDFESDLDHVEAGLLIAKKFNLDDYIYNAIESHHNKVIPTTIYGALVKIVDTLSAARPGARVNSYDEYYSRVKELETICMRFEGVKSAYVIKSGRQLRVIVDSNLVSDEQLELLGHEIKVAIEENDLLTNYKIKIVLIKEKRISIDTNIIG

SEQ ID NO: 76707 - protein, 597 aa, Ureaplasma urealyticum
MSESTLYRKYRPHKFKNVIGQDLIKQALMNACLNNKITHAYIFSGPRGIGKTSIARIFASSINCLNPNKGDCCGKCSVCESILKEQSVDLIELDAASNNGVDQIRIITDNINYLPTFFKYKVYIIDEAHMLSTSAWNALLKTVEEPPQHVIFIFATTEYQKIPLTIISRCQRYDFKRLNNSELQELIDSILTKEDIKIDNNAIDKLIQLADGSGRDCLSILDQLTTVKKNIDLDLINKTFGLVDNFKVISLIELIQKNDILLLREFIYELYNQGVNLEAFCVQIINVLIDYLIYLKTNDINNLKKVSVDELKKMLLINFNGNYLLNNFISLFNNLKKSLNQVFEFEIYLYKIINANNDKLENKKIELSINPEENKINNSQIITTKKIDCFEEINKNTVDFDKLYKTKIFYHKKINNQNDKESGINQKEELSTELVNDNKLICNSNDILDNYELAKQAFFNKDIKLSKEMSQKFKDFKNEETIENSYIDIIKQADLVLWCSPNALVLGVEFLGLINRINKVTHSFEFIKEFVKKFDSIKLVIAISKKQALNIINIKKQGLKTNIINDVLIDDIKMLLKQEEQRKQEQTALLNEIEDEE

SEQ ID NO: 76708 - protein, 99 aa, Ureaplasma urealyticum
MDFQKLAQELKKMQNTLSKKQKEFEEKVFDFDYKGYVLVKIKGDLNIEAIEIKTEIVDPEDKETLQDILRAAINEAISITCKERDAIMNATIPKGTGLF

SEQ ID NO: 76709 - protein, 201 aa, Ureaplasma urealyticum
MSKPVEFEMLVDALKSLPGVGTKNANKWAFFLLQQDQKYIDDLIKRIKEAKTNILKCKYCANFTNKDECDICLNEYRDFTKLMIVTTNEDLERIESANIYNGLYHITNGEISLRKNVVIEHTNIKTIKERVLNGSFKEIIIATSYTHDGEVTADYIIRMLEDIKDLQIYRIGFGIPLNSSIDYADDETLKQSLINKRKIRN

SEQ ID NO: 76710 - protein, 448 aa, Ureaplasma urealyticum
MFKAMIGSIVSKQMSKKLKNATIVEEDIKELLSEIRIALLDADVNLLVVKKFIKNIKEKTIGLYVEANQKPADLVLKIIKDELVEILGKENKPVNTAKSQLKIMMVGLQGSGKTTTTGKLANYFKNKYNKKPLLVAADIYRPAAIDQLRTLAKQVRVDFWEEGTQRPDLIVKNALNKADENENNLIIVDTAGRLQTNEELMQELVNVKKTLNPDEVFLVVDAMAGQDIINVATEFNNWLKLTGIIVTKLDSDARAGAVLSLTSLLNIPIKFTGTGEKIGSIDSFYPERMADRILGLGDIMTLAEKAADVIDEKQVRGSMQRMMAGKMDLEDLMRQMSQISKLGSFSGIAKMIPGLNNISENQIGDAESKMKIWTILLSSMTLKERRDPRVFKKEPSRRIRVLKGSGRSPDELNKLLKQWEVSRDKMAELGKMLQKGKNPFSKSGGLFS

SEQ ID NO: 76711 - protein, 236 aa, Ureaplasma urealyticum
MNNEFILEVKNLTKIYKKSNQGVFDLSFNVKRGEIHAFIGENGSGKTTTIKSIINAYTNYKGSILIDGFDNKTPKSHEKIGYVPEIALFPSELTTFQYLYSFARLSNLNKKQAIERIHNFLEKFRISDLKNKKPINFSSGQKKKVILIQALLHDPELIILDEPTANLDPSARHEFNNILKELHEQNKTIFICSHILKEMDTYVDSLTLIHKGKLVYSGHKYDALEKIYYDSVLKNK

SEQ ID NO: 76712 - protein, 1045 aa, Ureaplasma urealyticum
MENKVLLAEHENSTVVAEFKSIKVHSNKFESEAELEETFIKLLIAQGYEYLPIKNNNDLKNNLRKQIEKLNNYQFTNNEWESFLSTYLLNPNDGIEARSKKIHEDYSYPLKKDKDSITKNIKIIDKNNIHNNSIQVINQYQNNNLDNQQKTRYDVSILINGLPLVHIELKRRGTNLKEAFNQIKRYANHSFTDLYLYTQIYVISNGTQTKYYSNTTRETSIKERNNTNSKKTSNSFEFTSYWADSKNNQILDLIDFCQTFFAKHTILNILTKYCVFTSDNTLMVLRPYQIVATERIINRIKISLNDKKLLGTTGAGGYIWHTTGSGKTLTSFKTAALAKEIEGVDKVLFVVDRKDLDYQTTKEYEKYSKGCVSANTNVNELAKQIGNQENKIIITTIQKLGIFISKNPKHPIYSKNVVLVFDECHRSQFGDLHKKITKKSFKKYMIFGFTGTPILEENSNVKNKNIFFTTEHLFGACLHKYTIDKAIRDGNVLGFRTEYYKTLSEKDDIDDETSSTGIDKKEALENPIRISEIVDFILKNYNRLTKRNEEFFEHNKIANINEVITSRNKLSENKVLTTLNGFNSILACSSINAAKIYYSEFKKQQQKFPQEEKLKIGLIYSYLPSEQESNDNELSNFELLDENNENTNQLDLDSRNFLDEAIKDYNEMFGTSYSTDNANFNNYYKDFSLRLKDRSLDIAIVVNMFLTGFDATTLNTLWLDKKLKYHSLIQAMSRTNRILNGVKSNGNIVFFINLEDEVNEALRLFSSESNINSSIAILRSFKEYYEGYYNEDNQYIQGYRNLVEELKSNFKIPFNGTKEEERIFIKLFGDILKYKNLLSQFSEFEQNDDLIGTEMQDYQSIYIGLRDKYQDKKRMETDSIVSDLDFKIELISQQDIGVDYILKLMNEKLKKDLKEVKYHDLERDILSSLKARKKKDLIIEFVNEINKLPNKDEIDIFNEWSKFIKNKKESELIKIINENKLDNKKTFEFMKKAFENNEFNENGVDIVNLMPPTSFFKKSNQNSNRSKIKENATEKLLEYFEKFRG

SEQ ID NO: 76713 - protein, 348 aa, Ureaplasma urealyticum
MFGDAYEYLMSMYAANAGKSGGEFFTPQEVSELLVELTLIDFNNENKDVRRKIGKVYDPCCGSGSLLLKYAKLNEGVKFYGQEINLTTYNLARINMFLHNIGYDKFDIKLGDTLLDPKHNDDKPFDAIVSNPPYSTKWEGKSNPLLANDERFHVTQLAPKGKADFAFVLHILHNLSSSGTAAIVMFPGTLYRDHAEQDIRKYLVDNVNVVDSVIQLPDNLFFGTSISTCIIVLRKNKNNNDNANGILFVDASKEFVKSGIKNKLTNANIKKIVDTIRFKKEVTYFSKLVSREEVKNKNYNLSVNTYVEKEDTSEKIDIKLLNMQIKEIVAKIEKLRKEIDEIVLELEE

SEQ ID NO: 76714 - protein, 943 aa, Ureaplasma urealyticum
MDKIIIKGARENNLKNIDLEIPKNKLVVITGVSGSGKSSLAFDTIFAEGKRRYFESLSSYARQFLGGNDKADVESIEGLSPTIAVDQKSTNQNPRSIVGTITEIYDYLRVLFARVGTPFCPNGHGQIKSQTPKQIADFLFSLSPKSKIQILAPIEIKKGYKINDVLNNLRNQGYLRVLVNNEVYQLDENLPQFLDNKKTDVAIIVDRLILNIDHQTKTRALDAIEFALNYSGGEIAFKVNDDIHYFTQNDVCQVCGFKIKEIEPTLFSFNSPIGACEQCKGLGYNYVPDERKMIPNPNLSINEGGLDYFKNTVNTTNLDWQRFNSIIKHYKIDKTKPLKELDRKEIDLLLYGSDEAIEIDITSANNKKYSSIDYVEGVLELVNRRYQETSSELAREHYNKYMSEKVCKSCKGKKLSSQALSVLINKINIIDFIEKNIDEAIDFLLHLDLNEAQTKIANPILKEVLDRLGFLKNVGLEYLTLARPASSLSGGEAQRIRLATQIGSKLTGILYVLDEPSIGLHQRDNDKLINTLKEMRDLGNTVIVVEHDEETMLAADYLIDIGPQAGVNGGYVIAAGTPQEVMQNPNSLTGQYLSKQKDILVPKTRRSGNGHKVILKGAKHNNLKNVDLTIPLGKFICVTGVSGSGKSSLILETLVKAIEYTNFNPFVIPGEYKDLIGASNVDKIVVVNQDAIGRTTRSNPATYVGVFDDIRTVFENTIEAKARGYSKSRFSFNIKGGRCERCWGDGTIRIEMHFLPDVYISCEECHGKRYNDETLQVKFKGKSIYDVLKMPIDEALVFFENYPGIHRKLQLLVDVGLGYLELGASSTSLSGGEAQRIKLAKFLQRKPTGKTLFVLDEPTTGLHIDDVAKLIKILDKIVDGGDTVLVIEHNLDLIKVADYIIDIGPEGGNKGGKIIATGTPEQLLSKKDISYTAQYLEKYLKKN

SEQ ID NO: 76715 - protein, 721 aa, Ureaplasma urealyticum
MYFLKKIVNLFSSKIESEDNNVKKDDLTQPRKQSPEARKRRNRRIIFWLIILLIIGTIIGVIIYFSVRKEYDNVIVKSAQTEVVNNKKVLYLNTIRPNSTQITRYTIDEDQLLTARVNILNNTNFQIISNASSLGLSRISFNIVREGVEKFKLGETNIYAPISGNTNNQWNWLTSIITQNAGIPSSGFNPQVIISPLISIIFFIIFLYIILRVSKAQSDSLLGTNKANAKLTKSGVRFSDVAGIAEVKEELIEIVDFLKEPKKYVAAGARIPKGVMLYGPPGTGKTLIAKAVAGEANVPFFQTTGSSFEDTFVGVGARRVRELFEKARKSAPAIIFIDEIDSVAKKRGNSLTAVQDQTINQLLSELDGFDTSSGVIVMAATNRLDTLDDAILRPGRFDRQISVNLPDILEREQILRIHSRNKNLSAKVSLEDIARRTAGFSGAQLENVLNEAALLSVRDKATSIHMNHLDEAIDRVIAGPSRPNKVISEREREQVSYHEAGHALIGLYSPGADVVQKITIVARGRAAGYTLQTPERNENILQNKTELISRVRTALGGRAAEELIYGPNEITTGAANDFYKITNIVRAMVASFGMTDVGLTQYIATEGVDNPYRNSYSEQTALAIDIEIEKIIQREYKIVKEMINEHREELELIVQTLLELETILKPQIDYIHQYKQLPPEVIANKNKREASQKQANSSVEEAKVVDDEESIKDKEKDQKSN

SEQ ID NO: 76716 - protein, 418 aa, Ureaplasma urealyticum
MFDINLIRKDIATTKEKMLNKKVPSNLFDQIFDLDVLVRSLMQQEQNLNAKKNQLSKEIGILAKNKDPKLQQTLDLVNNIKNELQDISLTLSNKQDELNKLLLVIPNMPDDSVPIGNDENDNVEIKKVFKPKKFDFLPLAHWDLAVKNKLIDFDKSTKITGSRFIIYTNFGARLYRALQQFCLDMNVKAGFSEIWAPVIVNQESLIGSGNLPKFADDLFKLENSNYYLSPTAEVQLTNLHRNEILKASDLPLYYTALTPCFRSEAGSAGRDVRGVIRQHQFHKVELVKLCKPEDSFKELESMTRQAESILEALELPYRRIVLCTGDLGFSSAKTYDLEVWLPSYNAYKEISSCSNCTNFQARRAKIRYKETIDATTELVHTLNGSSLAIDRLWAAIVENYQQEDGSINIPKVLKKYIY

SEQ ID NO: 76717 - protein, 156 aa, Ureaplasma urealyticum
MLKLIWCQTLNGGISKNNKLPWYIKEELDHFYKTTKNHKIIMGKNTFDSLDQKPLNNRTNIIFSSIMQTPEDESYFVTNDFQQVLNDAKKEDIFIIGGKELFDIFLAYADVLIVSVLKDYYDCDLYMKVDYNNFNLDKQDVYDNFIVNYYSNKKEK

SEQ ID NO: 76718 - protein, 207 aa, Ureaplasma urealyticum
MHKIINHPLIKDKLTRMRKVSTVSTVFRTNLEELTQLMVYEATKDLELNEIEIETPVVKVAKGYKLKNKICLIPILRAGIGMVDGVKSLIPTATIGHIGLYRNEQTLKPVEYFKKFPKNISESDVIILDPMLATGGSVVEAVNIIKKYNPKSIKFVCIVAAPEGLKYVQEVHPEVDVYIAALDDKLNENGYITPGLGDAGDRIFGTK

SEQ ID NO: 76719 - protein, 415 aa, Ureaplasma urealyticum
MHSLIKDLKARNLINNITNEEKLIKALEKNKGIYVGFDPSADSLHLGNYIMIMLLKRFRLYNIKTLALVGGATGMIGDPSGKSAERNLLDKTILEKNIAKIKFQLEKFTNSQVINNYVFYENMTFLDFLRDVGKLININYLLEKEIINSRLSVGISYTEFSYNLLQGYDFLQLYKNDNIAIQAGGSDQWGNITTGIEMIRKNLGDDNIACGLTINLLTNSEGKKFGKSEKGAIYLDENKSTVYEMYQFLINQSDADVEKLLNFLTLIDVEEIKKIMQAHKNNPALRVAQKALAKAVVVDIHGQQKYEQALHISEVLFNGSISTLNQEELEIAIKSLPATKLDKDEIKIIDLLNLANISSSNRIARDFLNTGSILINDIKINDENFLVKKQDAINQKFSIIRKGKRNYFLILWNKD

SEQ ID NO: 76720 - protein, 837 aa, Ureaplasma urealyticum
MNLISKISPQNRILNRARLIAEEVLKKEEEYEHFSDQELINKSDDIIEYLANNNPLDDKLVEALCIIREVIYRVHNKRAFKVQIIGAIIVYFGDFAEMMTGEGKTLTLVLVAYLNALYKKGVHMVTVNEYLVKVGAEFATPVLNFLNMSVGQITANMNEYEKRNNYNCDITYTTNSELGFDYLRDNMVTNYANKVQRGLWFAIVDEGDSVLIDEARTPLIISGEPQEEIGNYVKADRFVKTLYPQDFTLDPESQSVALTESGVEKAQKFFNTKNYYNFENSDIIHKVTNALRANFTFFNGREYIVKKDDDGEDIIALVDQSTGRIMEGRSYSAGLQQAIQAKEQIKIEPENLTVATITYQSLFRLYKKLAAVSGTAITEAEEFLNIYNMVVVTIPTNKPIKRIDHPDYVFDNKRTKWKYVIADVIRRHENGQPILIGTASVEDSEILHQLLERVNIPHEVLNAKNHAREAEIIACAGEYKAVTIATNMAGRGTDIKLSPESLEAGGLCVIGTERSDSRRIDNQLRGRAGRQGDIGESRFFISMEDTLFSRFATDNLAKADDKLSEDVISTKFFTRLLNNTQKKVESLNYDTRKNLIDYDHVLSNQRELIYKQRDKILISSDNKDILYRMLDSVIDDLIYQSHNKPNEDIIDIKKLIDLATQNIFYDNYLNQDEYYGLKFEQIKTKLKKDCINFFEQKEQLMTPTIFNQILSEIMISNIDEEWTKHLDITSKIREGVNLRAYEQKAPLNIYVEDSDKLFEKLKHNVAWKTVCSIGKINYVHQDYSDLNSEFIVNDNEINENNNSIDFENFNESIPTDQTIQESFDDNQSDNEDDKNNN

SEQ ID NO: 76721 - protein, 673 aa, Ureaplasma urealyticum
MDKIKAKIDELKQKLDQWNYEYYVLDDPSVPDHVYDQTMRELIELENNYPQFKTNNSPSVKVGGFVSEKFNKVKHKRPMLSLSNAFNDDDLKKFDQDNQNASVDLKGYVVEPKIDGLSISIIYKNAKLHQAITRGDGINGEDVTSNILTIKDIPHYIDQKYKDYEIEVRGEVYMAFHDFYEMNDNLEESDKKFANPRNAAAGTLRSLDNSIVAERKLSAFMYYLVNAQELGIKTHYESIQFLRDNKFKVSDLIVKVDTINEVINQIDCYTKVRDKLSYMIDGIVIKINNLEVYDEIGYTSKFPKWAIAYKFPANVVSSQLLEIINDVGRTGKISYVAKIKPILLDGSMVEYATLHNFDFIKEKDIRINDEIKIYKAGDVIPYVDGVDLSKRLANSVPYEPIINCPSCQSVLVRENDEVDQRCLNIYGCKKINIEKIVYFVSRNCMNIEGMSDAIINKFYDANLIKNIADLYYLQKHKEFILTSDFKIKEKSFSNLINSINNSKKCSLEFLLTAFGIRHVGPNLAKKIAKQFKTMTALMHANFDELTNVDACGEKAALSLINWFNDEHNVSLVNQLQQVGVNMEYIDDFIYDDNINIIDEYKNKTFVITGSFSISRDEIKTILEKYYHAKVKNSVSKKTDYVLVGTEAGTKLEKAKLLGVKIIENEFWKKDNNF

SEQ ID NO: 76722 - protein, 436 aa, Ureaplasma urealyticum
MKLYDSYSNQLVEINDELISIYNCGPTVYNHIHIGNARPLITMDVLYRFLKKHNIKTKYVLNITDIDDKIINYALANNLKELEVSEYYFNEYLKIKKALNTLEMINPKVSTHMDKIIDYIQKLIDKQAGYFIGDDVYFDTKKALNYGQLSKRDLENDIVGMRIESAANKHNPNDFILWKKTNKGIMWNTPWGIGRPGWHSECSCLINTYIGEQVSIHGGGIDLKFPHHENENAQNQVLYNKNLAKVWMHFGLVNINNEKMSKSLNNFILVKDLLAEYDYQVVRWFFYQADYKQPIKFSHEIMKQNEKEILKIKNAIYNAKNYLYFNNQLKSLTQIDHFELFDERINDDLDFVGIVDLIHISVKKINILIKENKDMNELKLNLTQLLYMLDILGINFVDLHNDENLALLNTWKNYVDKKDYVKADELRKQLINIGIL

SEQ ID NO: 76723 - protein, 394 aa, Ureaplasma urealyticum
MKKNKYKLLIKSLVITSFLVTTSSVIVACTNKEKEQHLTELKKLSQHAKQIYNEIKTNELFKKEASVLNDQINKVLKINEQNNLDVITKNYNDLKKLLDEIQEKISKEKEKEKQQNAYLNKEINIKLENLNQIVNHNLLKGNKESFFNQIINFTPITTEIQTIINQNQNLLDFKNEELELKLKNLDLFIKELDHKFKNIIDQLFNIEDSYINKFLKFINNQDFIKDQKYQEREKFNPQEYLELTKSIQSSFNKLKNVTINSNLDQYLNSLNLVLLSLTNETKAFFTKFEDQIKKYFKWIVYGRDDTLTKAFNRIVEEQKRNEFIEQTEKALLTFPMEINQKFKMFVDFFTLKNDKNETEYQKIWKSKHNEVNKVWFGIAECFATGKCTDKNKPS

SEQ ID NO: 76724 - protein, 799 aa, Ureaplasma urealyticum
MTDNKNHSLISDIKSQIKKFSEKALTLEVGNVISLGDGIVLVDGLDNVMLNEIVRFENGVEGMALNLEEDAVGVVLLGDYSNIKEGDRVYRTKRIVEVPVGDVMLGRVVDALGKAVDNKGNIVANKFSVIEKIAPGVMDRKSVHQPLETGILSIDAMFPIGKGQRELIIGDRQTGKTTIAIDAIINQKGRNVNCVYVAIGQKNSTIANVVRELEAHGAMEYTTVVTANASELPALQYIAPFTGVTIAEEWMHQGKDVLIVYDDLSKHAIAYRTLSLLLRRPPGREAYPGDVFYLHSRLLERACKLKDELGAGSITALPIIETQAGDISAYIPTNVISITDGQIFMMTSLFNAGQRPAIDAGQSVSRVGSAAQIKSVKQTGASLKLELANYRELEAFSQFGSDLDDETKRILKLGKAVMAVIKQAPNKPYNQTDEAIILFTVKEKLIPQVPVERIQDFKEYLLNYFKGTKLRADLEDKKAFDKENTPAFRCAIQKAINSFLNNSQDFKPCEEAEQTAFDKFFNENESIVVDGENDFNFINEEVSLKPTTETSEAVQIEEKVQDFVEPQEILETNKMEENHIFEEVEPEKIICEHHEFEIAENQEKIEGQQVLEDTNHEYSIYETVEQSGEVDNDESKDDDLEVLVPVAEIEHDEAILDERENRNWVFSDSAVSEVEKQTIMISISSNEAEQLFDNAKSVVFFKVTPKYPVEKVLVYVTSPVQKVVGEFDLLKIDVNSVNTSWNKYRSSSVISSRKEYLEYFNSHKEAHALLASKVYKYRKPKDLASFNMNKGPSGFTYLK

SEQ ID NO: 76725 - protein, 179 aa, Ureaplasma urealyticum
MKSSLKPVEKYAYSIFEIAKEEKKLDLYKHNLETINSIIEEVPAFFEAVGDPARDRNERKQIVIKNLEGEIDIYLISLIDLLIDVKSVKLLKKIVLKALDFVNEALSVKKVLITTAYELTKNQIDRLLQSLKKKYVCEKIEPIVVVDKSIIGGLSINFESQVLDNSLKTKLFNIVKKVN

SEQ ID NO: 76726 - protein, 205 aa, Ureaplasma urealyticum
MKLNKKHLVAILSVLSLSIIVVPLLTSCTGDIPELNPAEIINTLFPNVWVFIAQVIAMCVVFSLVLWLVWKPTNKMLDKRREYIAKEITDAENAKQEALQYLENAKSEHLAAQAQTLEIIAKAKSESLTLRESLEKEAREAADKIISSAKISIANERRENLERLQSEAREAAYIAAEALMKKELSREDNDKLVDQFIKELENNEK

SEQ ID NO: 76727 - protein, 275 aa, Ureaplasma urealyticum
MENYSPLDIMIALPHIAAIIMVTLIIGTVSLIYFSMVKKLTVHDVPNRFVIIIGMIVDYFRGLVVDTMGAKHVKLAPYVLFTFCYIFTANLVSLFGFKEATTASAVPLAMALGTVIGGQIVALKYQKASFFLKFAFKIKGFPIMINPLEIVSKLTPIISLTFRLWGNISAAAILLNITYWAFAGFTNVVPWVGVSLIAAVVILPILIGYFTCFAGTIQAFVFTLLTSINWGLEIKEGEEHHAHLAHKKAEKLAAKKLAELDTQNQIQNNEAQVVL

SEQ ID NO: 76728 - protein, 981 aa, Ureaplasma urealyticum
MIFLKKIEAHGFKSFGEPVVIEFKHPMTGIIGANGTGKSNIIDALKWVIGDQSLKSMRAHKNDLLFSGGRYAPKAHIARVNLYFNNVNNVLYTQHKEIKISRVLNIKTNENTYYINDEVALLKDITDMFLDSGLSKGSLGIISQGAVSWFAEAKPNERRKMFEEASGIGRYSKRKQEALNSLSRANENLARLNDIVANLKKELAKLQKQAMRFNEYKQIKDELTKLDLVIIVRDIIHWQKQLNDIQENLKEYKKEYNKQKPLIQSKKNEIESLRVISDRYAKEYTNLEFEYKKLEDTINDLNLKLSLTKNTLETTAFNATNTQERIDAFATLIKTTEIELNNNKKNINEKKDQLKDIQKQKLELESLKTKQKNNLDTIIWEIASKNLKKEMLEEQFKRQTENERGVKTIIDSQKALVGVYGTVAQNISTKTEHELAISTALAKGINNIIVKNNQAAENCINFLKKNNAGVATFLPIENLQAKSIKPEFYDVLKELEGFVGVANELVKINVNYKISIDYLLGNTIIANNLKNAIILSEYTYKNYKVVSLEGDIVFGGGAISGGSNSKKNIILNLEEKIKELDLKIKKLNEEQIELNNLHNQTKKQWQEYYNSEQIINGILNNLITTNNSLSDNLNNYKSQYEALSATKLSKEEIESKISDNWNEYNKKKNELINLKQKIQTLKANLNTANLNKNELEITYNKELEDFYNLDKNITSCESNIDNLNYSIQNVQTRLVDNYKLSVENAIETYQNQEIDMSESAARLRIESLKIDLEKYNDINLNALEEYEEKQAEYDSNFLEYENCKQAVDQISSSIQELDKKAKADFMRVIRETNKLMPEIFEYLFGGGSCAISLNDPNNILESGVEIIANPPGKRDVPLSALSGGEKTMVVLAVLFALLKIAKFPLVILDEAEAALDASNVAKFGAIIAKYSDETQFLVITHREGTMKSCGYLLGTTMMNNGVTTLLEVDLNDTKIKYESEL

SEQ ID NO: 76729 - protein, 351 aa, Ureaplasma urealyticum
MGFFKKIFNKILGKKDTEQISQEISQKNEENRILKLEDNSINKFNEGLRKSSSALTDAINELAVKYIDIDERWYEHLEEVLISYDVGYVATNKIIESIRNEMIYQKVNDPDLIKSIIIDKIFIYYIQDTEINTAINLKENQTNVVLVVGVNGVGKTTSIAKITKKFIDENKKVLLVAGDTFRAGAVEQLKVWAQRLGVDIELPNKEGQDPASVIYAGVKKGYEQKYDLVICDTSGRLQNKINLMNELKKIHDVIHKFDEYAPHETLLVLDATQGQSGINQAKAFNEVTKISGIILTKMDSTSRGGIVLAIKDAFNIPVKLIGLGEKLEDLSVFDLEMYVDSIVLGMKLDVK

SEQ ID NO: 76730 - protein, 99 aa, Ureaplasma urealyticum
MLNKNKRWYLIALYDIYQGLLTTKQCEYFNLHYFKDLSFSEIAELKEISKSAISDCLNKVCDQLLKYEQALLIYEKNKKRNDLYTLINDSELVKKLKDI

SEQ ID NO: 76731 - protein, 260 aa, Ureaplasma urealyticum
MERQSMINKFLQSIKKRNLSKNTYLTYESHLRKFKVQEQSFKQIIKQLLNNNYKPKSLKLAKSILSEYWKFSKQYQYVQELEQIKLSKEQKSYKKVFSLDDIKKCLKINKQDTKQIKFYKTILLFYATTGIRAMEIYQLKQINNDLFVISGKGNKNRQICYIEHLWNNIKNKKLPSTKTLRKYLKVFFDNKNVSLHTLRRSFITNFLTSNENYKRGDMLKIVQDLVGHENIQTTLQYVQITKEQVDDVYKEFFKEFENDK

SEQ ID NO: 76732 - protein, 182 aa, Ureaplasma urealyticum
MMNNKNKFKNKEWKFSKKQVQLIYLTSSIISGLFLGLALLSTYLIAGLPNDNAFVLFVKEQKFYFPFFMTIGFINLIISMLTLLPTLKTLWRTVAKMHQYGDLSKEEFEALDILVEQIRNRYISVENIKAVISSNNYKTLDEELKKLEQQEKQLKIQEQEQKVKRLEQEIIKDDKTRVQSDY

SEQ ID NO: 76733 - protein, 291 aa, Ureaplasma urealyticum
MGKNNKYLIACDLDGTLLNNDSDISEKTIEGIKKIINQGHIFCIVTGRPLRGSIHIYEKLGLTTLMANYNGSYISNPSDKKFAPINMTFSKDIVSAILKNRFIAKNIVNAVVEADNVATILNSNMDLNIWKSFIDIFHVPIRDMNEKNKLTKENDINNLIRDANALLLNVNDKALFDSMVYHIKQIAPTLAVRSWSARVDDQFEVIEINSSFADKAMAMRYLSSYYGIPLDRCIAFGDGENDLTMLNHAGYGFAMKNGTRPAKLLARHITKHTNVENGVVWELEYVLNENK

SEQ ID NO: 76734 - protein, 333 aa, Ureaplasma urealyticum
MKRLISGIQPTNNLTLGNYLGAIKNFVDLQDDYEVFLFVADLHSLTPNIFDNTDFSTTKRQIIATYLAAGIDPKKTCLFYQSDILSIPLLAHILLCSTSIGELTRMTQFKDKSIKATKMANNTEMIPSGLLTYPTLMAADILTFNADVVPVGQDQKQHLELTRTLADRFNKRYGNTFKLPQVYIPKIGAKIMDLLDPNIKMSKSSKNLKGVIFLNDSKDIIFKKIKGALTDNLNKVKYDLTLQPGVSNLMTIYACLTNLSFKEIELKYQQQNYGVFKNDLANIVADFLEKLQQKISYWLNSPELDIMIDNSCERANDIAYQNVQLVLKHMQLK

SEQ ID NO: 76735 - protein, 270 aa, Ureaplasma urealyticum
MKNNKPICFYDIYCFKPQECFKRNDINLLEDKLKRYSKITFLRNKENPEIIFLLGGDGSFINFINQQWKKNVKIVGINYGQLGFYSSYDSIKTINLDEIIDENMYYNPLLLKVSINNQNFFYCLNELSLFSNELVSFDISINDYPYEKFRGSGLLFVTPSGSTGKNKTAFGPIIFNNHENFIMTEIFPVNHLKYSSLNAPVVFRKDYKISLTNIKFKKSFSVAIDGNIINFSDKINDIKVETIQASSKIHGLNNFKKYIDKLNKSFIKGE

SEQ ID NO: 76736 - protein, 159 aa, Ureaplasma urealyticum
MMIKIISVGKLKQKAFVDLINDYLKRINHYLKCQEIVVSDEPEPVQISNKSLEQIKSKEASKIFKNINQNDFVIALIIESNIISSETLAKKIQQWLNTFSHDICFIIGGSNGLHESIYERANYHLSMSKMTFAHGLAKVMLCEQIYRALSILNNGKYHK

SEQ ID NO: 76737 - protein, 440 aa, Ureaplasma urealyticum [sequence omitted]

SEQ ID NO: 76738 - protein, 321 aa, Ureaplasma urealyticum
MNQVNFLNLDKNILIITSGGDAPGMNASLISLIHRLMNNNFNVFIGIEGLLGLYNNLIEPIKDKRVFDVYFNEQGTVIKTSRFIKLDINDKKTQIIKDNLLSHNIQKIIILGGQGSMQAGLVLTKMGFEVFGILHTIDNDFSETQMCIGALSAASFNQKLLKCLNYTAKAHCAFNLVELMGRECSWLVNNSVGKLKPILMLTNQDNKYTVDEVIDLIKDKINSIKEYDPLIIVQELIYDQKWYELLVKTFEQKLHKSLRITILNYLQRGAPVSDFDLQLAKDSANVLVDFIVNQNDIKNTNNMYVVINKFDNKLEVIKFNK

SEQ ID NO: 76739 - protein, 474 aa, Ureaplasma urealyticum
MFSKTRIIATVGPATTKLFSNWLEFNDLNNINDAQQVCINIKDLILSGVNIFRMNLSHGDQKIHLFRTQLIKKIADELKIKVEILFDTKGPEIRVCEMSDNNFIIKNSEVIIHCKEKVLGSFNEFSVTDATGQYNMISDVKINHRILIDDGKLILIVKKIDFLKNIIYTTAKNSYSLKTNKRLNLPDANYSLPFLSKKDIDDINLAVKLKIPYLALSFISNIKQINEVKQLLKKSSFIPKLIAKIETQEAIDNLEEIIKNTDGIMVARGDLGLEVPFYKIPIYQNKIVELCHKYNKYCIIATQMLDSLERNIIPTRAEVTDVYYAVKQKVNATMLSGETAAGIDPINAVQVMKSIILETENNNIENEITFKKNELLIPKEVKLKILSFHKLKINKHKLLVVNLISKNSKHLVYDILKYDFNFNILFVIDKNQEHDLLLKNANFIISENKMLKQEELLKSFNIDFNNHEFLFISI

SEQ ID NO: 76740 - protein, 1434 aa, Ureaplasma urealyticum
MQNNKNYTEKFITDKVMRRDYSKIKSNFEGPNLLEIQVESFKRFMEKDLKEVISSIFPLKSPQGKYTLAFKGLKIKQPTKDESACRDEGKTFETPIYIDLELTDNYTGEVKRAQRNTKTGEDGIYLGAIPKMTEKGTFVINGIEKFVISQIVRSPGIYVLGKSSIKLNGSRKRLFEGKICEIYPSKGTLMLGYIPKDRHNIQIVARDSSGDNAQTFSVTTLLKAFGLTSAEILKIFNNEKEIRESLEIEKYAPEYIFENSQENEIIFKIYSDAHDIHEKADRRESNNKLKEEYIEQGSPLLSKLKQLIFNYVEKNDEIDALLHENKDVEDASFIKNNKKLYDEREEIINCIISEKAAKDIVELLGINIKNIETLRHLGKASYQIALQQHFFNKRLYDISSAGRYKFEKKLLLSERLYQKVIANDIIDKKNNILIPKDTLITKEHIELIKKESRDKNIKWTKKINLLPTALESEIEQFLEYESIAVYKDNDLRDETTEIVGLASGCKLQTLTVADLVATTSYIYNLNYEIGEFDDIDHLGNKRLKLIHELLRARIATSMARIEKFINEKLAISDGSSNNITNVNDKGIDTELDREIEESDMSDEEKKKAISVKSIINTKQFQSLVKDFFNSHQLIQFIDQQNPLAELTNKRRISAMGPGGISREDPNLDIRDVHHSHSSRICPIETPEGMNIGLIMSLASLAKVDENGFIVAPYYVVEDGVVKEDYKYLTAHEDDNYIIAESSVQLDENKRILDEQVVARYRGSTGLFSPNEVDFIDIVPKQVVSIAASAIPFIENDDGARALMGSNMQRQATPLIKPYAPIVGTGTEFKIAHDSGMAVVAKNDGVVEFVDSQKIIIRNDNDKLDDYKLIKYRKSNQDTCNNQIPIVKVGQRVHKSETIGDGPAMQNGELALGRNILVGYTTWRGYNFEDAIIISERLVDQDVFTSIHIDEHTIQCMKTKNGDEEITRDMPNVSDTAKRFLDNQGIVLVGAEVHEGDVLVGKTTPRGNVETAPEDRLLQTIFGDKSKTVKDSSLKVKHGQEGIVAAVKRIKSSDENGSELPDDVIEIIKVYIVQKRKIQVGDKMAGRHGNKGIVSKVVPIQDMPFLKDGTPLDIMLNPLGVPSRMNIGQILELHLGYAAAEIGKKQLIQIAIDQLGYEKYISLFGINEIIAKKLYENISNLIKHKQAKQAKDIDLIDVTIILKELGLSYDDIGIKISTPVFDGANHDDIVSIMNEANIDIENNKGKQVLYDGRTGEPFDGLISVGLTYMLKLDHMVDDKIHSRSVGPYSKITQQPLGGKSQNGGQRFGEMEVWALEAYGAAYNLLEILTIKSDDVQGRNQAYNAIIKGHDVVADGMPESFKLLTKQMQGLGLCITVETKDDRMVDINEYTLNQNRLNNDDDEVILDENLKEINDSNEEIFNTNFNNNDYDDEENF

SEQ ID NO: 76741 - protein, 1305 aa, Ureaplasma urealyticum
MSQKGIKSLTISIASPEQILNWSKGEITKPETINYKSLKPEPNGLFDESIFGPSKDYECYCGKYRKVKHKGKICERCHVEITESIVRRERMGHIELAAPVAHIWFTKELPSPSKISLLLDITYKEVDQVVYFVNYIVLDEGNNVYDGKSIFNKKEVLDLTSPKNSIRSRNKLRRTLRNIQERIEDELNHEREALIQDFDYRLAVTYDQMLKDSNIPFSVKDVMAFIEKHTGVRFGIGAEAIRELLEKLNLEEEHEKIKQAIQNSPNAYDQKTKRLLRRLECVRWIKDSGSKPEWMVMTRIPVTPSETRPIISLDGGRFTTSDTNNFYRKIIIRNERLKQMQATDAPEILLDNEKRLLQEAVDSLFDNNSRKKPVVGKDKRPLKSLSNHLKGKQGLFRQNLLGKRVDYSGRSVIVVGPELKMYEVGIPALMILKLFRPYIISELIRKRDELGNEIQPICANIKLAEQKILAQDNEIWPVVEKVIKQRPVILNRAPTLHRLGIQAFEPKMVDGKAIRLHPLVTTAFNADFDGDQMAVHIPLSKEAVAEARSILLASWHILGPKDGKPIITPTQDMILGIYYLTKEKFPQVIEEMMAKDPTQARVEFINNFHIFSTQDEAIRAYKLKTIRINDVIGITTKAFNNKTFSKEGILVTTVGKIIFNQAFPVNFPYINDVKNLYGENQFEIIGMHESILDYLKAYNLKEPLTKKTLSTVIDYLYKVSEIEVVPQTMDKIKALGFKYSMISATSISAFDIPSYDQKYEYFKETDELVSKLREFYLDGKLTDDERYTKVVQAWSQTKDKVTHDIEKLINSNEYKDNPIVIMAKSGARGNTSNFTQLAGMRGLMSKSYNYDQKNNNGVIKDTIEIPIKHSFIEGLSVSEYFNSSFGARKGMTDTAMKTAKSGYMTRKLVDSTQAVVIKDHDCGTKEGIIVREIRNTKDNTSIESLKDRIVGRYSINTIYDTKNKLIIESDKLITSEIANIIQNSGIREVEVRSPLHCASLYGVCQKCFGLDLSTNKLIETGTAIGVIAAQSIGEPGTQLTMRTFHTGGVAGDTNITQGFERIKQLFDCIQPQENEKAVISQVKGTVERIEKDSNTNGYNVVIKYNKDNYVNYPTRSNAVLRVKTGDEIIAGQKITEGSIDVNDLLKYAGIENVRHYIIKEVQKVYRMQGIEISDKYIEVIISQLTNKITITNPGDSGLFVGETISINEFTEVAQNMLVNKKKPPSAINQVFGLDHAPSKSGSFLSAASFQDTKKILTDAAARSQKDMLIGLKENVILGNLIPAGTGLKDVEEVIAYGEEMYKKQY

SEQ ID NO: 76742 - protein, 197 aa, Ureaplasma urealyticum
MYIYYNKTSLNDTLIFLKNNQQYDHQVFLNDDLLLFYHGDELIGLNLFNASEYLKNLNEGYLYPTTQLIQKLSDLIKIKLSLDNAFKGFVVGKILEVNLIPNTHLHICLVDIGDQQIQIICGAQNVRIGLKTVVATPNLLMPNGNEIKKSKLMNYDSFGMLCSQKELNINNFNSQGIVELNDEYQVGQLFTKVYSNL

SEQ ID NO: 76743 - protein, 330 aa, Ureaplasma urealyticum
MSKNDDILLFSLSNSHQLANKIANLLKIELSPIRIDKFADGELIVAPQVPVRGRRVIIIQSTSKPVNDSLMELLIAIDSIKRASAKAISVVIPYYGYARQDRKAKPREPITARLVAKMIESAGATSVLTWDIHSLQTQGFFDIPFDSLEAVWVLMKHYFSAYKDSSNITIVSPDYGGVKRAREISIATGATLAIVDKRRSGKNQVEINNVLGDVKDRDCVIVDDMIDTGGTILGAAKIVREKGAKSITIIATHGLFNNNARQHFQQAIKDRIINKICIADTIENEPFDGLEIVSIAPAIAKCIEIYSEGTGSMSFVHDENSKVLFAKKIY

SEQ ID NO: 76744 - protein, 179 aa, Ureaplasma urealyticum
MNKPIIKEVIIVEGKTDAQKIDQLVNAQIITTNGSEINKKTLALIKQAQLSKGIILFLDPDYQGERIRKIITNYLKDGIIKQCFISKDNMKNNSKKIGIAEANNDALLKALKSQGTFVINSIESITWLEYLSLNLNNKKIRLMLCDYLNISYCNHKQLFKRLNMMQKTFKEIKIIIEGF

SEQ ID NO: 76745 - protein, 279 aa, Ureaplasma urealyticum
MKLCDKEYILSVIATPIGNLEEVSERVIKCLNEAYVILCEDTRVTAKLLHLLNIYDYKKLISYHNFNEIQKLNEAINYIKKYPTALVSDAGYPTISDPGYKLINECHQQNIGIQVINGPSSLMHALVASGMCSQDFMFLGFLGKTQKQRVEKLKLYKNLQTTFVIYEAVHRIEKTLMDIYEIWGDILIFIGRELTKKNESHYYGYLSQLPPITEKGEFVIVIDNKINQDVIKNNNINECLIKIRDLMKQNFKLKDACKEVSKSSNFDSKELYKLIINQK

SEQ ID NO: 76746 - protein, 408 aa, Ureaplasma urealyticum
MLDKLIKTLKNPHSIDDIVGQKYLLDEIGIIRRMVNHHQVFNLIFYGPPGVGKSSLAKVLAQDLKVPFAFFNPVVDSKKQLMQIIEQALDLNNFIIIIDEIHRLNKDKQDILLPIIEANKIKLFATTTENPFFVINPALRSRCQLLSLKPLTSSQISERIKTLINVEEVFEPQAFNLLINKTNGDLRAVINTLEIIYLLYKEHKVDYVLLKRIMQESYALGSSDGDEIHDLKSAFHKSMRGSDCDAALYYLARLIIIGDFEAIYRRVSVCVHEDIGLANPNLCLRVDQGINSCRFLGYPENQVILANLVLQICLSNKSNSVYLAYQKAFEDAANGKQYSIPNHVRDAHYASAIKLGVHGYKYPHDFKNNYVNQQYLPRELTNKKYYVPQNNEQEFKLNQNQQKFKNNN

SEQ ID NO: 76747 - protein, 521 aa, Ureaplasma urealyticum
MLKQKKFFISTPIYYSSGNPHIGHAYTTIIADVLARYKRLFGYDVFFLTGMDEHGQKIQQKAFEENISPKALVDRNSIIFLNLWKRLNISFSKFIRTTQMDHEESVQKVFSYLYKQGKIYLGQWTGYYCVSCEENYNPAEIIKSQDNIMLCRMGHKLETKSEESYFYKMSDQAPFLKTYYQNHPNFIIPNERANEMVNNFLNNLEDLSISRTTFDWGIPIAENPKHVIYVWLDALMNYLTATGYLSNNEELFQKYWCDNETEIVHLLSKEIARFHCIYWPIFLNDLQIRFPSTILSHGWIITKEGKMSKSLGNVIDPNVLIDTYGVDALRYYLMADLSLFRDAIFSEDNLIETYNTQLANSYGNMISRTLGMLKKYRNNIVPKYVGCVLKNDEKLENLINKNIELVQENINKYSIDKALNCIQEILVEANKYIEDNKPWELAKNQQEQELDSLLVHLVKVIQVTTTLLSPILIEGSKKAVEQLNFDESFLTLASLASYDIFNYHKVNDSKPIFARIIVEKQ

SEQ ID NO: 76748 - protein, 329 aa, Ureaplasma urealyticum
MNDQKDNKEIQTIVPLNQKTNLNELDAKAIYDEFQKLNKYQRAFAWLKLPKQKKAELKQFLNKKKTQVDLLKEDFNHANVFEIRNFNFWYMNRTKHVLHDLNLDIKRNKVTAFIGPSGCGKSTFLRNLNQLNDLIEGTSHEGEIYFLGTNTRSKKISSLELRTRIGMVFQKPTPFEMSIFDNVAYGPRNNGINDRKILEKIVEKSLKSAALWDEVKDDLDKAGNALSGGQQQRLCIARAIALEPEVLLMDEPTSALDPIATAKIEELILELKKKYSIIIVTHSMAQAQRISDETVFFYQGWIEEAGETKTIFIHPKNKRTKDYISGKIG

SEQ ID NO: 76749 - protein, 74 aa, Ureaplasma urealyticum
MTYMLLTSSDLHCGSCSSNLYNVLEKIGAQNISVNILNSEFAFEFEENKIADQDVIKEINKNGFKTNILEKYIY

SEQ ID NO: 76750 - protein, 709 aa, Ureaplasma urealyticum
MLKNNLIKKFQLLPINKRRYLISLMKTSIALLISIPLMVFEMLFMFKSNLILSIDGYFIYGWIVFVLSIFIVFGLGFSFFKGAFFEVFKWKKPGMSLLVVISTCVAFIYSTYSLISNTIIYEPKLHGFFETACMIIATMSVGQLVSDRIKLKANQDLQSLNNLQVKKYNSYDLNTKQVSEKVVFQAKINEYALVKKGEIVPLDGVLYSQIAEVDESSLTGEARPILKTINNDIIAGSINVGDNFIFKITKLYNDSTIKKIINGVNQIASSKPKIQVVADKISLWFTPFILLMAILAFLLQAFVPSIQELPIAFLNLHGSNNDSNLYEKAAYVAVSVLVISCPCAFGIAVPLAVLIGAGHGAKSGITFNNSNIFEKIKKVNAIAFDKTGTLTYGKLQLKQVIGNDQFLDLIYQMELISLHPLAKSFVTYAIINNIVMSTKLIDIKEVAGVGIIAKDVDGNIYELTSEHYANENQFDFSLINQKSSTSTNLLASNIIFSINKKVQSILVFEDEIRADAYETIKVLHENNIETYMITGDSFNVAQKIAKELGIKHFYAQVKPEEKANIIKKIQNDQKTVMYVGDGINDLLALKQANVSISIGETNKATNAVADISLIKPDILNIYKVIKLTKITKMFIVSSLLWAFGYNLIFIPLALIGIIPPFISVLIMTTSDIAVVLNSLIFRLLKMRLVNKKQIHKLNLKIINEAMLHK

SEQ ID NO: 76751 - protein, 89 aa, Ureaplasma urealyticum
MAVSKQQKHDLTVKFGGSASNTGKTEVQVAILSAEIDSLTTHMIENKKDKASKRGLYKKVAQRKKLLSYLQRVDIERYRALIKELNLRG

SEQ ID NO: 76752 - protein, 64 aa, Ureaplasma urealyticum
MAKRDQLTGKGPLSGNTRSHAMNHSKRRWNVNLQKATIKTENGSQRVLVSAKTLKTLKKHNLLA

SEQ ID NO: 76753 - protein, 100 aa, Ureaplasma urealyticum
MNKLYWLTDLQLFASKKGVGSSKNGRDSNPKYLGAKLGDGQSTKAGQIIYRQRGNKIYPGLNVGQGKDHTLFAKTAGVVKYTKFMGDKTKVSVLPKEDNN

SEQ ID NO: 76754 - protein, 102 aa, Ureaplasma urealyticum
MIKINHYPNALLVKGHANFDEHGKDIVCAGVSAIIMGALNWFDQQKTTIKVEQGFILIIIDNNNQLYRQYLELIIIQLKAIYFKYQSYIELHEYKQQYKRGL

SEQ ID NO: 76755 - protein, 100 aa, Ureaplasma urealyticum
MFAIFQTGGKQYKVQQGEKIYVEKLDLEVGSKISFDQVIMVEGSVGTPFVKNAVVNATVIKQGKQKKINIIKFKSKKHHLKRQGHRQPYTQLVIDSISVK

SEQ ID NO: 76756 - protein, 386 aa, Ureaplasma urealyticum
MREEIKTNSILNYKYKVVKHLADGGFSKVYLCCFLSDETKFIVIKVLDINDEKQQMVVYDELRISNLIKNSDSDKKNYIMEYYEYFETGSLENNDKRIYIVFEYIEGLTLREYLDEFKTITYVKAVEIIRQVALGVSFFHSCNPQIIHRDLKPENCMINKTLTKIKIIDYGAASVFYNREDLTKDQEIKCTIIYASPKLLSLGQKVKEQANKGLNKRALSLINDALGVSYDIHSLGVMLYELITGTNPFSEHTITDDRDYLEKWITYDVEPLSLINKTIPKGIDNILMRCFAWKKEDNKLLYKDIYTLIDDLSNVMDPESNLNQEYIKPLNKLRIYRKNLAGLYEIKEKDRKWYLQKWFIILISCLSVILIILLIIILFFKKSGAI

SEQ ID NO: 76757 - protein, 250 aa, Ureaplasma urealyticum
MKDFIRYTKKRNLSLNTIRTYESVLKHYEPVLDSWIKIRNKIINSNFKPRTIHLHKNVLLSFFEFKKLKRYLQNLKLLKLPQIEMKYFDVISKNNLYKKTDILDDDSLEIKKYKTIIRFLFETGIRAHELFFLESINNRLYVLGKGNKKRQIFFVKQTFEQLQKFYENLKGFETTKTLRLYIKKIIGKNFTPHSLRRSFATFMLIKGANPKTVMLQMGHANIQTTFSYLNLNEQTNRRIYNKIMYQNDAE

SEQ ID NO: 76758 - protein, 759 aa, Ureaplasma urealyticum
MGFVLLTASAIIAFYTFPSLSTAGWIAIIFAFITAMCWFIPIGIAAAEMATIKGWAEGGIFTWVRNLLGPRNGFIVTWLQFQVTFGFVAMILFVLSSFSFAFAGADGYNYFNTLKLGTTLNQATSVNFSKNFSNGALYGIGIVVVAGLIFMSLLGQKRTHQFGQVALIIGILLPFFIILGFQIYTVATMPDPLYFIGKHFQKEPHLDPSVTGTSYELNKTFMSSVVMASFMAFSFSLHGVEVSAIAANRMDNPSKKYPQAMMIVVISALVCIIIGSIMISMTVPTSTLSFNGGLVQTIMFNLSVGGIDVKLPDGTVAHYKTLAHAYSVIETQYGTAAANQVMYQFVYGHPINTGSDLARSDLLTLTSEVNDPLKNPSLFISVMNIETNKMAMQGLQAITFFIGIGVFVEVSVWMSNLSTGLNYAMRKAHFPAWVTYRLKNGSALTVAILWIVLLMCIFAIYMFGYNSLMQYKGQTISDILANEIRINQDQKEPMALLSNQNLDEIKLMARSIYEHSHAPGAQANVLHFDFNKHANSEVKAIYDKIKDYIGINAVASGTPASITNISFISNVVSQISMYYIGYNIFLIGYLRYVFKANWLRREFRVKWSWLQISLALLAMGVNTFAVVATYLPAAPELYPGQEAYYVFISIALPMFICTLLLGLFIYLINYAWNKKRGINLSEHSNLTNVDQNVLDVINNWHLYKDQKEFAKFERHVQLLQQKQVIVRTTKDKAQRELVANEMQYLAAEIATRFAPEEEH

SEQ ID NO: 76759 - protein, 178 aa, Ureaplasma urealyticum
MSSNNDARKNQPLINDQIRFRTMVVIDDHGNNLGEMNRIDALNLAASKNLDLVVIAKKGNIPVTKILDYGKYKYEQKRRQKESRKNQTIIKVKEIKIKPMIGEHDLKVRAENAKRWLEDKDNVKFVIEARGRMCTKDEFIVQAYEKFIDLIKDYGTVVQANKKVSNYRYETIIEPIKK

SEQ ID NO: 76760 - protein, 64 aa, Ureaplasma urealyticum
MAKIRQKTKRAVAKRFSITKNGKLKRKHAYRSHLALGRSTKAKRHLRKDAIMSTSDTKRYTQCL

SEQ ID NO: 76761 - protein, 120 aa, Ureaplasma urealyticum
MRVKGGSVTRQRRKRWLEKAEGSWGTRNTSYRIARQTVIRAAEYAYRDRRNKKRDFRKLWISRINAAVRELGYTYSQFMNALVKANVVTKDGQGLNRKMLSELAINNPEAFNQLVDKVMK

SEQ ID NO: 76762 - protein, 101 aa, Ureaplasma urealyticum
MNQELRIRLESYDHRLLDDTVKTIVNISNSTGSKLRGPIPLPTKKEIFTILRSPHVNKSSREQFERRTHKRLIILENPQPKTMEALKRLSVPFGVEVTFKI

SEQ ID NO: 76763 - protein, 233 aa, Ureaplasma urealyticum
MKSLLGTKVGMTQVFTETGKAVAATVIYVEPNKVLAVKTNEKDGYSAIQIGYETVKEKALNKPLLGQFKKANSDPKRHIKEFRDVVAEVGAELTVSEFEPGQLVNAQAYTKGHGFTGSIKRHNFSMGPMGHGAGYPHRYVGSIAKGRGGSQAQRVFKGTKLPGHYGHELVTTKNLLVLDVKANENLILIKGAIPGPKGSIVLLKSAKKVGHIVSDPQVVNYLANKASSSEANE

SEQ ID NO: 76764 - protein, 211 aa, Ureaplasma urealyticum
MAKIKLLSIDGNFAKELEVTSDLFVEVPHKQAMFDSVLAENAAERQGTHSTLTKGEVRGGGKKPWRQKHTGKARTGSTRNPHWTGGGVVFGPKPNRNYNLKVNAKVRLLAFKSALTIKLNEGKMLGLVANSDLETPSTKKMVNFINNANLENQKVLLVIVDNFSNIKKSTNNLQKVTTKLWYQVSVRDLMHANVVVVAEEAFTNYARKVSK

SEQ ID NO: 76765 - protein, 105 aa, Ureaplasma urealyticum
MELTRVILHPYTTEKTYSIRNKSEHETLTFIVDKNANKYQIREAFIAIFGLKPLKIRTTNRRPAKIRTSTARPGYTKAKKIAYVVMPVGVKVAVSKEEVEAANAK

SEQ ID NO: 76766 - protein, 279 aa, Ureaplasma urealyticum
MAVKRIKNHSSGKRQTVVVDYKSILTTSKPEKSLLVTLPKKAGRNNQGKITIRHHGGGHKRKYRIIDFKRNKDNIYGTIKSIEYDPNRTSFISLVVYADGEKRYIIAPKGIKVGDKIISGNENIDILLGNSLPLEFIPEGTLVHNIELSPNAGGQITRSAGASAQILGFDETKKYILVKLNSGEVRKFRKECRATIGTVSNDEHILENLGKAGKSRHLGVRPTVRGSAMNPNDHPHGGGEGRSPVGMDAPRTPWGKRHMGVKTRNNKKSSTSMIVRRRK

SEQ ID NO: 76767 - protein, 88 aa, Ureaplasma urealyticum
MSRSLKKGAYADPSLLKKVEAANASVSKKPIKTWSRRSQIFPNFVGLTFEVHNGKTFLKVYVTEDMIGHKLGEFAPTRNFKNHTEAKR

SEQ ID NO: 76768 - protein, 311 aa, Ureaplasma urealyticum
MTNKVIQRNIHISHRKASLVIDLVRNKPVHEAIRILSNTPKKFAPIVLKLLNSAISNVQHNSKDMDPSKLYIYKIVANQGPTMKRTLPRAKGSADQLFKRTTHLEIVLSDDVNEREKELAAIKAKKSKKPLAVEPIAKVETKKVAKPSKVEIKPVEKDENVDPELLKREQQVLKVVEKTASQKEEETTETIMISTSPKNAQVLFDDLEKNVIFYKTTPINKVLRVLVYVTSPTKKVVGEFDLESVEIGAISSIWRKYSKQSVISKKEYDAYYEGKDKAHALVSKKAYKYRNPKDLSEYNMTKGPSGFQYLK

SEQ ID NO: 76769 - protein, 257 aa, Ureaplasma urealyticum
MGQKVNPNGLRFGINKQWLSRWVPTDQLQMAKWLVEDDKIRKYLSTKYKNAGIDHVEIERDQQRVNVYVYAVQSGLLIGTEASEKKLIELAINKIVGRKQLVSLKVVEVQIPELQASLMAREIADAIENRVSFRIAQKMVIKKVLKAGARGIKTHVSGRLGGVEMAREEGYTQGVMTLHTLRADIDYSMQEAHTTYGIIGVKVWINRGELFGNKLVNSVAHAANKEFSRSSKPKKGSFNRSSRSKNTKPAPKQAVSE

SEQ ID NO: 76770 - protein, 138 aa, Ureaplasma urealyticum
MLQPKRTKFRKPHKVSYEGKAKGNKQVDFGEFGLMALEGAWIDARQIESARIAISKRLLKTGKMWIRIFPHMSLTKKPLEVRMGSGKGSPEKWVAVVKAGTVMFEIANVSEELMCEALRAAGNKLPIKVKIVKKGEAN

SEQ ID NO: 76771 - protein, 75 aa, Ureaplasma urealyticum
MSSIAQDLRKKDSLELEKIVIELKAKLLELRFAAANGEAEKLHTAKEIRKTIARALTILNERELAEKLNNKEANK

SEQ ID NO: 76772 - protein, 84 aa, Ureaplasma urealyticum
MERSRRKVLEGLVVSDKMQKTVVVSVETKSKHPIYRKLVISHKKYHAHNDNDDAKVGDLVEITETRPLSATKNWRVSKILERAR

SEQ ID NO: 76773 - protein, 122 aa, Ureaplasma urealyticum
MIQHMTRLKVADNTGAKEVGVIKVLGGSKKRYASVGDIVVVSVKKATPAGLIAKGQMAKAVIVRTKKSIRRESGLLIRFDENACVLIKEDKTPRGSRIFGPVAREIRDRGYTKIASLAPEVL

SEQ ID NO: 76774 - protein, 110 aa, Ureaplasma urealyticum
MNRIKKGDTVVVISGKNKNKSGVVIQVNPKEQTALVEGVNKIKRHQKKDQTHEQSGIIEKEAPIRLCKLALVDPKGKDKGKATKVKYLLKDNKKVRVARKSGSELDVNKK

SEQ ID NO: 76775 - protein, 184 aa, Ureaplasma urealyticum
MAFLKDLYKNKVAKDLQKEFAYSSVMQIPKIEKVVINAGIGNAVADKKHLEAAISELTLITGQRPVETKAKKSIATFKLRAGQSIGAKVTLRGDRMWAFIETLFNIALPRVRDFKGISNNSFDNQGNYTLGIKEQIIFPQVVYDDVKSVRGFDVTFVTTAKTAQEAKALLVGLGAPFQKVRGDK

SEQ ID NO: 76776 - protein, 61 aa, Ureaplasma urealyticum
MAKKSLIAKQKKHQKFAVREYTRCVRCGRPHAVNRKFGVCRLCFRDLAYAGAIPGIKKASW

SEQ ID NO: 76777 - protein, 132 aa, Ureaplasma urealyticum
MYLDPIAELITKINNGRKAHKAEVSFATSKLKTAILELLVKEGYIKSYDIRPTENNKSETVVKLKYKNQTTSSINGFKQISKPGLRIYSTHLNLPKVLNGLGIAIITTSKGVMSDKQARKENVGGEVIAYVW

SEQ ID NO: 76778 - protein, 182 aa, Ureaplasma urealyticum
MSRIGNRKLTIPANVNVSVESGKVHIVSQTAKLSVDFPVNLISVDVVDNTVKVSRANDEKQTKMFHGTVNANIANALVGVTTGWKKELEVKGVGFRAKVEGSKLNLGLGFSHPLLIQIPTGLKVETPSATEISINGADKAAVGAFAAVVRAYRKPEPYKGKGVMYKGERIVRKAGKTADKKK

SEQ ID NO: 76779 - protein, 121 aa, Ureaplasma urealyticum
MKRINFSRAKQRALRAKRLHVKIRNLQLAANKPVLVITKTNAHIWAQLICYNKNITLASSSSVQLDLQNGNKDNARLVGVDIAKKALAQGFKQVIFNKNGAKYHGRIKALADAAREAGLEF

SEQ ID NO: 76780 - protein, 203 aa, Ureaplasma urealyticum
MENNVKKETIVDSEKVEKQQLVTAPVVNKKENTEPKAKTFKRETTTSNFEERVVKIKRISKTTKGGRMMRFSALVVIGDKNGTVGFGMGKSIEVPDAIKKAIKNANNNLIKVKQTKKGSIYHDVNGRHGAAKVMLLPAPEGTGIIAGGPVRAVVELAGFTDIYTKSRGANAPMNVIRATINGLLQQLTPKEIARLRDKSLREI

SEQ ID NO: 76781 - protein, 148 aa, Ureaplasma urealyticum
MQLHNLEYKKGSRNHKEKRVGRGHGSGLGKTSGRGQDGQKARKSGMVRLAFEGGQTPLYRRVPKVGFNNDRFANKYNVVTLISLVKYETKELTVEFMYANKIAKNEDLPIKVIGNAVLPSGTVVSAHKFSKGALESISNSKAKAQILE

SEQ ID NO: 76782 - protein, 471 aa, Ureaplasma urealyticum
MTNKQKKKNAFRQLLMIFKNKKVLVALIVTLSILILFRIGSVIPMPYIKLNGNFGNQGSFFSIINLLGGGGLSQFSLFAIGIGPYITAQIIMQLLSSELVPPLAKLSKSGERGRKKIEVITRIITLPLAVMQAVIIINLMTRANGFISIVSNAPFAIGSPLFYVTYIFLMVGGTYISLFLADLISKKGVGNGITLLILTGIVASLFNHFIAIFSNLGSLTSSKVSQIIGFILYILFYIMILIGVVFVNNSTRKIPVQQTGQALILDHEKLPFLPIKIMTAGVMPVIFASSVLAIPAQVAEFLDKQSMGYYVIHNYFIVDSWTGLAIYVVLILLFTFFFSYVQLNPPKMAEDIKKAGRFIPGVQVGMDTEKHITKVIYRVNWIGAPILAFLACLPHLVALVAKTINHGIPVIQPSTIFGGTSIIIMVTATLELWNAIKSTSTSTSYAYQRKELETSITVSAESDKSSKSQIW

SEQ ID NO: 76783 - protein, 213 aa, Ureaplasma urealyticum
MKILLIGPPGSGKGSVSELLTKNNTLKHVSTGNLFRAILKEDSELARKIKEINVSGGKLVPDEITNQVAKSAIDELIKNEQSFILDGYPRTINQALALEQYCNLDYIFYLDIDHQELMKRLTGRWMCPKCAGIYNIHFKKPQVHGLCDNDQATLYQRADDHADAVSIRLDEYDKLTLPLIKHYETNPRFIKINANQPIEDVYKNINNYLKQNK

SEQ ID NO: 76784 - protein, 74 aa, Ureaplasma urealyticum
MADTEKLKMLGKIVEVLQGGNFRVQLENGITIMSHVSGKMRVNKINILPGDTVDVELSPYDLTRGRITYRHRDN

SEQ ID NO: 76785 - protein, 37 aa, Ureaplasma urealyticum
MKVRASVKAICKDCKIVKRSGVVRVICANSKHKQRQG

SEQ ID NO: 76786 - protein, 132 aa, Ureaplasma urealyticum
MARILGVDIPNDKRVVISLTYIFGIGKSTSQQILKLANIDENIRVKDLADEQIAEIRRVALNFVKANGEKLQLEGDLRRTVAMDIKRLMEIGSYRGIRHRRGLPVRGQRTKTNARTRKGPRKTVANKKIETR

SEQ ID NO: 76787 - protein, 121 aa, Ureaplasma urealyticum
MAKKKKLSFTNGIAYIHATKNNTIITLADEQGSVLSWASSGSIGYKGTKKKTPYSAGIAAEAAAKAVIDMGLKSVEVHVNGTGASRDTAIRSLQAAGLEVTKIKDVTPIPHNGCRPPKKPR

SEQ ID NO: 76788 - protein, 327 aa, Ureaplasma urealyticum
MRKFLKYQLDVPSINSEDKNRTVVKIAPLEIGFGDTLGNALRRICLSSIPGASMFAVKFGGYSHEFQPYEGVKEDITHIILNLKNLAIKIDELIYSEDYFNNLLIDKWPKMKINFKGPGVITAKDIVCPVGFEIVNQDLYIAEVTKPIDVEIEIFAKTGRGRVDFNTNKDFVSTLHIIATDSNYSPVLHYAYNVEMIKDSKSSMSEILTIDIATNGTISGSEAIAIAAKIMQAHLEPIVNIDKTINEMIIMREREEEEKRQNASISIDDLDLTVRAYNALKQSGINTTAELIELTKSQLEKIKNLGRKSVTEIIQKLTERSLELKKD

SEQ ID NO: 76789 - protein, 119 aa, Ureaplasma urealyticum
MSYINKPGKTRAWRKMVSRQQVSDVISHGSIVTTKTKAKESQRHVDHLITLAKKNTLASRRAAAAILLGTNQHSADDLLRKLFNELGPKYANRAGGYTRVIKLGNRPGDNTEEAVLQLV

SEQ ID NO: 76790 - protein, 982 aa, Ureaplasma urealyticum
MSFDPENINPSTGLNDEQVLKSRQIYGFNEIKKKKKSHIITKFLKQFLDFMVILLVIAAAVTLALVIIKPPHDTAELVVQYVEFGIICFILLLNAIFGTIQEVKAEKNTDALSKLASHQVKVLRNNQIRIINSNQVVMGDVLILEAGDQVPADALLVNSSSLEVDEAILTGESLPVVKNAKAIVKKNTVIGDCLNQIFSGTYITNGTAKAIVTNIGMNTEIGKIAKLINDQKTKLTPLQKKINKLSKIIGLFASILCIAVFIIYIYLIGDGNWNISWHPALIMAISLSIAAIPEGIVAIVTIVLSFGIKEMAKQNALIKRLPAVETLGSANVICSDKTGTLTQNKMTVTKVFTNKLKITDLIDNESVFNLIKWATIANNGIKNFNEKKQEYEFIGDPTETCIIEAALKLNIDKYKLDQEFIRIHEFPFDSTRKLMSVVVKHQSDYYLITKGAIDAIDKIVQNPITKDVYEANDFLSKQALRILCVAIKKLSSIPTNFNQDELEKCLEFVGLIGMIDPPRPETQEAVKIAIKAGIRPIMITGDHINTASAIAKQVGILNEGQEVLNGNELNMMSDNELINNIDRYSVYARVSPTDKIRIVKAWQHHDKVVSMTGDGVNDAPALKAADIGCAMGITGTDVSKASSDMILIDDNFATIINAVSLGRSIMDNIKRIIVLLLITNLSGLVSLIFGIIILGINPMSSLQILWINVIAETLPGIALGLHLADVNLMRHKPLKKSAPIVNKRMWATIFTNGFFVGLISILLFYLGASSHFNFDFMLMRNEFKELTNLEKIYQDTWSWFGQNHEISNIIHEKILTIKTAIMAGSSLTFVFMGMSLTFNALSLRTNHSVFVNFWENCKYVVYSILISIVMIIVIAYTPHLNQIFNMNPYNINGYEWFNILPFVLFAIPLSIFEIIKYFRYLKLRSTFDYKNKTYALLNQEIQSTNLKINNTKISYEKQYYKALLNNLIIKRKILINKCHKEI

SEQ ID NO: 76791 - protein, 874 aa, Ureaplasma urealyticum
MKKKLSKKYSFKEVEANKLLFWQENNLFKAQINSTKKPFTIVLPPPNVTGHLHIGHAYDFTLSDILMRYKKLKGYDSFIIPGTDHAGIATQTKFEKNLKVNAQTNRFNLGRELFLEKLKIWKDEQINYIHKQWNALGLGLDYSNYLFTLDPIVVQTVREVFVKMFNEHIIYRDKKLVNWDIQLKTAISNIEVIHKEVEQKLYYIKYLSQDQKDFVVVATSRPETMFGDKYLVINPKDKRYFHLHNKIFINPINNIEMTVILDDYIDIEFGTGVMKCTPAHDFNDYELAKKHNLEIINIMNADGTLNEKCGEFKGLDRLEARSLIIDKLQKNNHLLKVESYRTSVGFSERTNEIVEPYLSHQWFIKMDSLIKDTIKMQDDCNNKVDFYPNRFNKTLLTWLKNTEDWCISRQLWWGHQIPVWYHKKTNQIYCDTIPPKDLENWIQDEDVLDTWFSSGMWPLLTTKWNYNSHFFDRYFPTSLIVTGMDILFFWVSRMMNFSQYLVEKKPFKDVLIHGLIRDSQGRKMSKSLGNGIDPFDIIDKYGLDAMRLFFASCTTIGEDLNFSTERLGANWNYLNKIWNIAKYIENLDEINDNLNFEDVDKFCDVNKWILTELSKLTLEINKNMDKYNLVVATKYLYDFIWNTFASYYLEYTKVLLQDLTLKNETIKTIRYVFNKILIMLQPFAPNISEEIWLCLNQTNNSILLQEYPIINFEFETIIIDKIAKIILEIRKLRLEENINNRINLCFELISPNDAFYKSKIKLVNLLLILVNAEINEIKKTSSNNYTYELVIDDFILKTSYEKPIDYVFQMKKASEQLNYLENEIQRATNLLNNSGFINKAPAQLIIKEKNKLINLKKEHANLLKTLTDLKQKVK

SEQ ID NO: 76792 - protein, 172 aa, Ureaplasma urealyticum
MLNIVLFEPEIILNTGNIARMCVGFDANLHLVRPYGFILDKKRFHKDFIRASTNHLNALKLYEYDDFNEFINKNNISGDEIYFFTRYGTKTPCDYQYQNIIQHNVYLVFGKESTGIDHNILKKYPHNWIRIPTSINLRSLNIANSVAMGIYEVVRQNNFKDLFKYEPHKKFE

SEQ ID NO: 76793 - protein, 223 aa, Ureaplasma urealyticum
MINKNKKFHFQYFKKDNDQSISTKETLKRYFNFRSQSVKLIIFNLVLTAFFLALFLIGRFLTKNLDFLNGFSWQLQMGIFVLAIVCIPNFYYKLMYYIIAPLVMLAIGFSAEPFFGYLMPHYGFGLILFTDVILIIVKKSCQSIKKQIFLSYLLIFSFSIIGYFIVWMGYSIQGTLFYNTAFIPSMIYNSLVTFGSMAINFVLYIISIPAIVALKNKYLCKLV

SEQ ID NO: 76794 - protein, 251 aa, Ureaplasma urealyticum
MEQIRNLIDLQIKLKPIQKAFYDAWSKTFINGIDNNKETHEQNKKIILEIYMILKVFLNKNRDIISKIPLNQVKKIANDILEKEIILEQPLVDYYYQSSSCFILIPYLIQILYQSYHLNKPIYKIMCKFIIRNNLALFKEWDLIERQTLEIIKLKTNLIEDNNKAINLFSCEQRELQHNRFVKLFNNFILVYWTKREVKYIEAIRFLMYFIWIPIIFIVLLILILGLYFGLSNSESLKSSTQFLLDLFIIN

SEQ ID NO: 76795 - protein, 363 aa, Ureaplasma urealyticum
MGPIIPNTRLIDFKFDRDLLNSAYTAHYFIKTCKIIELHAPNHSVIMQFTHFSKTPIMVCGTSEVLALLEFCLSKKELKQLKIYYVPDGHVIKPKEALFVIEGPYEIFGWLENIIDSILARRSSIATNCYNVLNLINDEQKVIYMSDRSDDYSLQPYDGYAAAVGGMQYFVTQKQVEFLKDINYECKVIGSMPHALIQQNNGRIDLACEMFAQTFPSDPLIAVIDYNNNVLNDLEQLRYMFDRLFAVRIDTAKDLIDESLLSTFNNVGNRDLHGCNPYLIALVREYLDNNGGKHIKIIASSGIDLNGIKNFNKHNSAIDFYGIGTYLSHLSVHITADLVCLDNVYGAKVGRKIAKNFSEMILY

SEQ ID NO: 76796 - protein, 55 aa, Ureaplasma urealyticum
MSRGVSVEGDLEKALKKFKRISNETKKDSKRHEYYLSPRIRRKEKIKEANKYRSF

SEQ ID NO: 76797 - protein, 550 aa, Ureaplasma urealyticum
MITQKISEELNKALAKMGIHDTQETKILVDKTKNIKFGDFYTNIAMILSKKNNKSSLEIAKEIANNFEQDLFLEVNLQPPGFLNFKLKAKDHENLLKQIYYEKDRFGQFSKKNITYNIEYVSANPTGYLHIAHAANAIYGDILANLLKIYGYDVETEYWINDAGNQIDKLAMSVLVRYLQLQNINIQLPADAYHGQEIHLVAQTLYQTYKNQFINVRLNEKYEIDDDIANQEIKNFAVKYLLNEIKNDLASINTFIDTYTSENWIRNSGRILEVLSKIKPYTYTLDGALWLKTTTFGDDKDRVLIKSDGSYTYFTPDIAYHDYKFNKTNTTKLIDVWGTDHLGYIARLKAAMNALGYDPNNLEIVCAQVMKLVKNNQEFKLSKRSGQSLTIKDLVEIIGKDALRWFLGSSSMNSHVIIDVDIALSKNNNNPLYYVQYAHARANQVLNKQVYELDFKTDLLTETRERELLNQLHFYKQTIANAANNREPHRISNYLYDLAQIFHNYYANVKINNDNNKVLSAQRYTLVWCVKQVLANGLAIMKITPYDQMY

SEQ ID NO: 76798 - protein, 422 aa, Ureaplasma urealyticum
MNSLNKKSIKDLDVNGKTIVLHLDLNVVVDYENKRILNDRKLRASLPTINYLINHNAKIVILSHLGRIKTLADKQSGKYSLEIIVDELRNRVSKNVNRVVFSPLNYGETVVQMVNDLEERDILILENTRYCDISDEGEYVGLEWDGSEILGQFWGMLGDIFIDDAYGVAHRQLSSNYQTAKFAKKSALGFLIVNEINHLDIALEVPKSPYLALIGGNRVADKIAAIEVLCERADQVIIGGGLVYTFLYAQGYNVGLNLVERNMIDDCNNILEKYGKKILICFDFLCNNDFSDTRPIYRKIDEGLEGLYGLDIGKRSLKFIKHEIYRSKTILLNGPFGVIENIKNYAQGTTEICKSMAKQTTRGAYTIICDIDTSSHAEYLGLDKYINFISTGGGASLSYIEEGVLDGLETIDNVPLNVLKKE

SEQ ID NO: 76799 - protein, 130 aa, Ureaplasma urealyticum
MNAKIKAKTRSQMIDELSKMLNIEKKQTKAFMDTYEAFLILELSRAKEVRLGNIGKFKVSVRAERKGINPKTGETVIIPEKTIPKFTFTKGIKEIINAGISIDNERVSIDDNDFDDDDEFVEEYIVSENN

SEQ ID NO: 76800 - protein, 718 aa, Ureaplasma urealyticum
MNELVKKKLDDLYDFLKQKKYSSQTIELVHKSFDFANYYHGDQTRKSGEPYIIHPIATVRILASWDMDESTLVAGMLHDVLEDTNCPEEVMEKTFGKEVTQLVCFVTKVSLYSKNRRNKVSHTNLEEKYSIQVFMSMTQDIRAMIIKIADRYHNMQTIQYLRLEKAKRIATETLEIYANISGRLGMYRVKTDLLDMSFKILDPQNYQLVNDSINKLVENNQKKWNEILARLKNILIANNIKAEFEWRLKGIYSTYKKITSGYEVKDIHDIYAIRVILDDVYLCYQTLGLVHMNFTYIINTFKDYISTPKWNLYQSIHTTISYEGTLVEIQIRTTKMNLFANNGLAAHWKYKEQKDNKTEILLTVNNVLLRDFLLSTDKGIKTIKDVTTGTIFDVLILNSNKWITVSNGSTLLDVAYKYDINNFFNILAIYRNGERSHFDTHVETGDTIKISYSNGIETIRPNWITLANNDVVKLHINNHLKKYELNKQITKEQFLANAEFFLEGKIMSEEHAIKRLEKEFQVNSINTFLDNIANTDIDLQTKYKVFSENKQVSREAINTIKNQAWKWLADSSYFSGLENLYFTDFEISPCCSKIPGINCVAKIVRNKVEIHRNDCSKVKNSRSKTIVIEWSKEKLENRPRYFKVNLTLKGNWSESVGNVLCNTLIRMKANISKVDISKNKTARTHDTFLKIYVKNLDHLQKIILELQAKNVINEWRLI

SEQ ID NO: 76801 - protein, 542 aa, Ureaplasma urealyticum
MEIDLMKHIQKTKFIFVTGGVYSSLGKGVSASSIGRILVELGYSVAMQKLDPYLNIDPTYLSPLQHGEVFVTKDGKEADLDLGTYERFINADLNKYASVTSGKIYYEILTKERENGFDGKTVQTIPHVTSAVIDYIKKIKDSLKTDFIIVEIGGTIGDIESLPFIEAISQFKTIYGVNNVMFIHCSPLIYIEKVGELKTKPTQHSVKTLRSLGINLDLLLLRTNQKLDEVTIKKLAWSCGLDIDMIFAAYDVESVYLLPNVLFEQGIHKTILDFFSLPLKNDNINSWIDFTDKITTFKKHNLVIGLVGKYVELPDAYKSVLASLELAAIELNIDLKIKYIQPQNLNENNINEELKKINGIVIPSIAGSIKGWPGALLAASYARKNNIPFLAVGTGVNIGIGEFINNVLKLPIEFINLGNGDFSFLKDAFVKNEIENYRIGEYCSNIQANTITSQIYLKQNQLNERHRHHFEFNNHYINNYFLNQNWKIGAISVDNNYIDVLEYTKNHFYVLTIFNPEYTSKPSKANPYFINLLKMSLKIKES

SEQ ID NO: 76802 - protein, 420 aa, Ureaplasma urealyticum
MINYSKPRGTIDLYNKEMNDFKLLENFLLSTTKRYGFQQIKTPVFEFAELFMKSAGESSDLVSKEMYLFKDKSDRWLALRPEGTAGVIRAVVENKLLLNHPLPLKLMYFEPCFRYERPQAGRQRQFHQFGVEVLGTKNIYYDFELIALADTILKKLMISNYILEINYISSPHNRSLWVKSLQEYFHLHRTELTPLSQERITTNPLRILDDKLESQKLVVKQAPKISHFLSNEEKEEFNLIKKMLDDYNIKYYVNEGLVRGLDYYSGLVFEFISTSPKLLGQSTIIGGGRYGELIKQTGGPNYEGIGFGIGIERLLIALSETNKNILNTDDDKYLIAFFDKELENEAIKLTQILRINNQLNVDIILSSTKADKIFKLAQRLNVKKLIILAKKEWSDKKIILKDLLNFKQDLLSLDEIKGIR

SEQ ID NO: 76803 - protein, 578 aa, Ureaplasma urealyticum
MKVYCGYIGEEHLEKNVILNGWVKKVRKMGNLVFVDLKDRFGIVQIFATKSDGVFNELTQLSREDVINVEGLVLLRKNPNNDLKTGRFEIHVKKILIYSKAKTPPLIIEDETDANEEIRFRYRYLDLRRDVNLKIFELRSKVYQAFRNYLYSQDFIETETPILAKPTPEGARDFYVPTRTRKFYALPQSPQTFKQLLMVAGFQKYFQITKCFRDEDLRSDRQPEFTQVDIELSFADEIEIQTLIENLLKYVFKQTINVDLTTPFMRMSYEQAINDYGSDKPDLRFDLKIKTLNTYFENSKTLFFQKALLNNQSIRAILVPNINLNKKQVQTLEKFAKDKGAKGLSWISIKDEKIIDGSLLSIQEDHIIYKTIFKDFNLSTGSILLVADTFDIASQALGLVRINLASILNLKKPNIFKFVWIIDWPLYEYDNEAQRFVAAHHPFTMPTLETLNTFDVNKKDARGRSYDIVLNGYELGGGSVRIIDQQIQRRMFKSINMSDEEANLKFGFLLTAFEYGVPPHCGIALGLDRLMMILVNSEYIRDVVAFPKNNNGVDMMLDAPSNMNDEDLKELGLKIKND

SEQ ID NO: 76804 - protein, 127 aa, Ureaplasma urealyticum
MKTQWAKRVKLFQFIYHWLITKKNKPIALKCALVDFDLDLNWINVGEYILDNYEQLTKMIKPLISKDWTFERLSYVEQALLLSAYGEYLVLKTPKKIIIDQTLITTHNYSNNESYKFINAILDQLLN

SEQ ID NO: 76805 - protein, 234 aa, Ureaplasma urealyticum
MQRYFVSKIKDKKVYFYDSDVHHIKNVMRMRLHDKVIVINKTKAFVAEIINLEPLHATIIKPYTLNCELATKIDLFQASIKPNNFEWIVQKACELGVNSIYQTIFKRTYNHSLIKTNRILTIIKEACEQARRNHLVNYYAQFSFNELLKYLRDYDLILIAYENEKQNLLNNAFKEELTYQKIALVIGPEGGFEQMEINLLKQFDNAICISLTKTILRSETASLYLLANLVNKLI

SEQ ID NO: 76806 - protein, 303 aa, Ureaplasma urealyticum
MDKYNLIIGSHVSLKAKDFFYGSVKEALSYGSNTFMVYTGAPQNTKRQPIKSFKIEEAHNLLKKHNINLDDLIVHAPYIINPCSSKKNVRELAKEFLIQEIQRTESMGITKLVLHPGSRLEQNEDIALEQVYTMLNDIFSTINTNVIVCLETMAGKGSEIGVNIKQLKTIIDNVHSKKNIGVCLDTCHMNDSGLILDYYNFNQYLKEFDAQIGINYIKVLHINDSKNPCGANKDRHENLGYGTIGFANLINIIYHPLLNNIPKILETPWFNVNDELIPLYKHEIKMIRDCKWYDIKNKLLSKK

SEQ ID NO: 76807 - protein, 381 aa, Ureaplasma urealyticum
MDIVIKKNCNFVKNDDHLYSFYTPLIGMQAVALYSWFVNRENIFNKKGTINLTHEYLLDELNISINTYNELITKLINVDLIKIYSFENNSQQVIEVFRPLKFSEFINIEKFNEELKNNVSLNHYNVLNLLNKENNIDTNRLIDLSAQFKTNHFNNLENKLDKIKKIILKEYGLSLQIDESTKLCLINFFKKYKFSIDQMLNLIKNNLINNIDFLTIDLNKLELTIFSNMEFEKNKTKFQYYNIERDFNIFNKNSNLDRFKNVINDYNNFKPSDFLKHIRKEKLSLKDKEAINLLTYDKSLSDPIVNVILDFVLFKNLGRLNVKYLKRIKETVLGINIKDEYEMIKFFQNKKNDHKELICEDSDNANTFKNTNFIEVKFGDL

SEQ ID NO: 76808 - protein, 186 aa, Ureaplasma urealyticum
MFEQVFFLASINDKKIIRWLYERYHKIFLKYINEQLNFKFYTLEIEANDLKTIIYEIFLKIFQVTRIKSLNQFIGFVKRQIYFYLVYLLRKSLSNKNLVNHLNNNNFENYELISTNSDEVGAELNNRFLIYEFLRSIQKENLFLYHFTILIIKGYNTKEISEILKINSAKIYYYKALLKKYIKKLL

SEQ ID NO: 76809 - protein, 84 aa, Ureaplasma urealyticum
MANIVSNEKTYRHTQKVRKENHAKMSKLRTIVKKTRSSNEQAQLNEAYKVIDTTASKGVIHKNKANRLKSRTAKAFKTNLEVTA

SEQ ID NO: 76810 - protein, 458 aa, Ureaplasma urealyticum
MSNSFKSKEFIEYFKDTAKQNEIEFEVLSSIIKEAFEKAYLRTHPGENFETNIDLKQGTINCFRNLVVVENEKVHNEDLETCLDDAVEILLDDARKINANAQIGDLIKQHISIDNFKSIEVGQIGSLLRQKITEIHNKRVADFWKPSLMKMIRAKVAEVNYNKQRNEITGVKVELDDQWKTLGYLSRKDRIGDEKFKVGETYDFLIKEVKEQSRLWPILLSRTEPELVEEILKREVVDIKNGNIEIKKIARIAGFKTKVAVSTNLLNIEPVAVVVGNKGLTITSISKQLNNERIDIIRYADDKRIFIANAIGLDKLKGLLVQENESGQRSAIAIVSKDDLPSVIGRGGANIRLIAKITEWNIDVKTIEQAFEENILYEKFDEKIYRSWNIESINKKNVTNDEMLALIDSIEDDKIEQDVQLNHPLKQQEKKVVSSNDEDGENDETQLEYLEGFEDFKF

SEQ ID NO: 76811 - protein, 614 aa, Ureaplasma urealyticum
MAKKNIKQKKDNRIAIDVKKHIKKVDVGVFDGTFVFTSPLSISELAPKLNKSPNEIIMRYFKKGVVYNLNTILDEEQIGELCLEYDLDFKIEKNVNTENLLENIYFDDLEIDLVARAPIVTIMGHVDHGKTTLLDTIRKSSITASEAGGITQHIGAYQIIKDNRAITFIDTPGHEAFTEMRARGANLTDIVILVVAADDGIKMQTEEAIDHAKAANVPIIVFVNKMDKYEANPEKVLNQLSAKEIVAEELGGDVVFVKGSALKNEGISELLDSILLIAELNNYKANPNRLAYGTTIEANLDKGHGPLATLLVQNGTLRKGDYLVVGSTYGKIRNMFDEYDNEIEIALPSKPVKVSGFEEVPTAGDKFLALADEKQARAIANDVKQKKMRLERAMLQSSDIRTKIANGELKNINLIIKADVQGSLEALKGIFSSINIEGVTTTLIRSAIGTISESDVRLAQTSDAIIIGFNVRASRIIKDLADSVGVQIMNYDIIYKFKEDLELWMKGTLDPIIIEEVIGEAKVLKLFKHSQVGTICGCRVINGKIKRNALVRVLRDGIVIYNSKIATLQHNKDSVNEVIADKECGLTIANFNDIKENDIIEVYIKVEKKHDEVK

SEQ ID NO: 76812 - protein, 257 aa, Ureaplasma urealyticum
MLKIITSNKNEEIIHFYRLIHDKKYREANKLFIIEGFKLLDEALQNQQTIVSIIINEHVYNKEFETIFKYTLYDNIQIYKVSGNIIKKLSVNIEPSPILAVVKIKQEMCDINDNILLLDNIQDPGNLGTILRTCFAFNIKQVIFNNCVDLYNPKTIKASMGAIFKINFLRFNDSKLALNFLLKNKFYLIATILDKNAISLNEITIKQKYCLMVGNEGHGLVQTFIDHAHIKTMIKMNQTESLNVAVAAAIFLYELNK

SEQ ID NO: 76813 - protein, 327 aa, Ureaplasma urealyticum
MNSRFKFNYDINNKLALSFTKDLIANKKQKNKKKFLLFLFPFYPLKLFKTINLIVVFAVLVAIRLGMGFLHIKIPGFNMVISFTWMALMVLGWYFGPLIGIFAGFLVDTLAWLISGGIWFWMYAIQEPIVGFIAGFLGSVATLRKKTKRPIIDLIVNQIFILFFSILTLFMILTLVNDGKNSLFSILKKRDKEINEDWISIFKYLAIAFLATFVLLVEAFVIIYYLRNRNRSKVQLINFIYCSLLVIFSTMLFSFALGPYVSVAYLKYIKVPITNYLKYGVNYYLLPRIIKESIKTPIYIILLSSIISAFDYVFLNIKQINMHKWKH

SEQ ID NO: 76814 - protein, 603 aa, Ureaplasma urealyticum
MAKEIILGIDLGTTNSCVAVIENKKPIVLENPEGKRTVPSVVSFNGDEVLVGDAAKRKQITNPNTISSIKRLMGTKEKVTVLNKDYTPEEISAKILTYIKEYAEKKIGAKVNKAVITVPAYFDDAQRQATKNAGIIAGLSVERIINEPTAAALAYGIDKLDKEQKILVFDLGGGTFDVSVLDMADGTFEVLSTSGDNHLGGDDWDQVIINWLLKSIADEFNIDLSKNKMAMQRLKDAAEKAKIELSGINTTTISLPFIAMDSSGQPINFEKELNRATFDNLTKNLIERLKKPVLDAMKESKLSLVDIDQVLMVGGSTRMPAVQNLVKELTGKEPNHSLNPDEVVAIGAAIQGGVLAGEIDDILLLDVTPLTLSIETMGGVATPLIPRNTKIPVSKSQIFSTAADNQPSVDIRIVQGERSLAADNKLLGNFELSGIEPAPRGVPQIEIKFNIDANGIMSVNAKDLKTQKETSITIKDSQGLSQDEIDKMIKEAEENKEKDAKVKHERELVNRADSLINQLEQVSKTENVPQEQKDVFNKQIEDLTNARDAQDYVKLEAEVKKVEDLLTNAAKFAQQAQQQNPDNQNNNKDDVTEATVTDDSTKK

SEQ ID NO: 76815 - protein, 224 aa, Ureaplasma urealyticum
MKKYISIAIDGPSGSGKSTAAKELAKKLGFLYINTGLMYRAYAYFLSINKLDINVNEMDCINAIKNANFIFNGDNVKINDNDVSLILRSNDVAMIASVVSANEKIRDLATNEQRRIASENNVVMDGRDIGSIVLTNADLKFYLNTSIQTRAKRRLFQNKDIENLDYESIYNDIKERDHRDMTRKIAPLKKANDAVEIFNDNMKLDECVQHLYEIYLKKIKKLNF

SEQ ID NO: 76816 - protein, 791 aa, Ureaplasma urealyticum
MKKPILISRAIVVLPYETTTIEVGRPKSIQAIDLAKQSSSKEIIIISQKDIDTDEVVNFDELYKVGTLVKIKSIIDNFDEGYSIEVEGLKAVYINNENDVIDAIEYEYEDVITNPILSNKDEIAINGINSEIFNIINKRSRHKNINFDNMHALISLEKEKFAYLAAATYINDYDNEISEKTIEDRINILLQPNLLLVHETILHLLFDQLVDKRVIEDEVEKTITDKINNNFQKQQREFYLREKLKVVKEQLGELSSREEDADKIRAKIEDLELPPNVKERALAELNRFENAMSSNESSVIKSYLDWLLDLPWTQQGVDNTDLMSVRTHLDDNHYGIEKVKERILEYLALRMRNPNLKGPIICLVGPPGVGKTSLVTSIAQALNKKFVKVSLGGVRDESEIRGHRKTYVGAMPGRIIKGMKKAGVINPLFLLDEIDKMTSDQRGDPAAAMLEVLDPEQNKNFSDNYIEEEYDLSKVMFMATANYYQQIPYALIDRLEVIELSSYTAIEKREIAKSHLLKRIFMDAKLNENELIFTDDALDFIINHYTKEAGVRELDRQLGHIVRKYIVETYKNKNNQSPLNLKVDEAMIIKYLGKIKFDFNKKEETTIPGIVNGMAYTAAGGDLLPIEVNHSTNGKGGNVTITGNLEKTMNESVSVALGFVKANADKYGIDTKKVSFKEIDIHVHVPSGGIPKDGPSAGIAITTAIISSLSQRPVRTTLSMTGEIMLRGNVGIIGGVKEKVISAYRAGVREIILPIDDERYLEDVPKYILDDIKIHLVKHYDEVYNIVFGEK

SEQ ID NO: 76817 - protein, 448 aa, Ureaplasma urealyticum
MSTKQNEPLFVNLEDLKQKVKLSFTEEFSFSYALSELEAGIFESRNLKGADAGDPEEILLNVVLDVSKKKRSRNEIKFNKLQNYFIHMNLREEHFSEIIDVLEAIGIRVPDYDLVMQSKSKTNTKKKDEYGIDDTLEISTSKIGFSSTTTEKVDDGIKAYLGVLGESKMLRSDEETEYAKMVISDDPSLVKIGKNQLYTSNMRLVTSIAKKYLNRGLDLEDLIQEGSSGLLKAIDKFDHEKGHKFSTYATWWIRQSITRAIADQARQIRIPVHMVETINKLTKAERNLIQELGRDPTAEEIAQAMNKVSQAKNQKEQLITAQKVVEIKKLNVDPVSLDKQIGHDEESQFSDFISDDEIISPEKYTEKKALNDQINEMFEKVLNDNEQRVIKMRYGLLPFERPYTLEEVGEYLGVTRERARQIESKAIRKLKHPSKTAKLRSFIGESEN

SEQ ID NO: 76818 - protein, 227 aa, Ureaplasma urealyticum
MSAISKNIIIINKPIKWTSNDVVQKVKRVIGAKKVGHAGTLDPNASGVLVLGINEGTKLLTKLILDNKSYIAEIKFGTSTNTYDAAGEIVSSTNRMVTLTEVTKIVKDFYKNDYWQKPPQFSALKINGQKAYVLARQKVDFEIAPRLVKIFKYQIMDFNYEKQILKISLHVSKGFYVRSFAVDLATKINNLAHLLTLIRTQSGPFEIKDAIEIEQVYDYWNNINKYL

SEQ ID NO: 76819 - protein, 283 aa, Ureaplasma urealyticum
MIIEITSTNIYKIKQQFVINELIIGFFDGIHLGHMNLLSDPNNQTILTFKNIPRKIKKLYDFNERIQQLEDLGFKRIFIYDIDQNNLSGEEFIDQILKPLTPKKIIVGANFTYGNNFCNASSLKQYFNVEIKIITNDVSTTKIKELIINKQVEIANKLLIKPYYRVGNVVRGDQIARNIGFNTANILCDNNLIDIAEGVYKAQVIFNNKKYDSVVYLGIPKTINTRSFSMIEAHILDFNQNIYDERIKIVFLKYLAPNLKFNNIDELITAIKNYIKLVLDKTN

SEQ ID NO: 76820 - protein, 367 aa, Ureaplasma urealyticum
MKNPSRFIFIIKNNILNTINNASFIENGNFKKKFRVYARKQHLAAWVISIVTILFLSLLVMFIKINNQGQLLNNRTPLDLFKVNYETILQIWITGASLGASAYMFQRITKNRLVDTSTLGIGNVCLIGLFFLAISINFENYGSQKLFENLLPFIFIISGVCAGLILYWFSKKRTGFSHTKLIVSGVFINFIAIALSISLKDNLTLVASNYIDDRLLGNFSNRNSTEKYLSYAVFLFLMIWCFLRSAKFKVVITDTMIAEQLGLKVKLLNLEMIFISSCLTAVSYIMGGNVLFLGIAAANLGYAVFGNRFSSSIIFSSFITIIFLIFGQFILDNIVQNLTSLVFDAPIVTPLLVAPIFTFIILFKNNI

SEQ ID NO: 76821 - protein, 475 aa, Ureaplasma urealyticum
MNYKTLINGAFVDAKEKLPVYNPSNNQIIAYVPNIHNENEINTIFENAHIAYLKFKDTPIKYRCDLLLKLADKLDEHKQELAQIISTEIAKGLKDSLIEVERSADYLRETVFEYQKLMQKPIIFDETVHHVKNKVATYYRIPVGVVLAICPFNYPINLLISKLAPALVSGNSLVYKPSTQGSLIGIRISELVHEVGFPKGVVNCLTTEARITGDLLVTNKYVKAISFTGGPKVGNHIAEITSKISLVLELGGKDPALVLDDADFELAANEIVKGAYGFSGQRCTAIKRVFVSHKNHDLLVNLINKKVDALTVGLPQQNPIITPLINSNSLKYNLSLVEDAIKKGAIVHQKIVYNEKNNLLHPLVIDNVTKEMRVAWEEPFGPILPIITYNSIQEAIDLINQSQYGLQACIFTTNYASIEQLALQIESGTININKSSSRGPDILPFFGVKDSGFGVQGIVDAILSMTTIKGIIINK

SEQ ID NO: 76822 - protein, 218 aa, Ureaplasma urealyticum
MAKLNFKKNISSSPFFRNIPNIITIFRIFLALICIILLLVDFYTKNLNIVYEVLDANISALRLSATIIFIIAAFSDFLDGYIARKYNLVSNLGKILDPISDKILVNGVLICLTLDHTALAYLTIINILRDIFIDGLRMFASSKKIIIPANIFGKIKSILLFISICFILFLLSLTSSWKNVYLFNIPLFFATSLSVISGIIYYINFYKGVKKRGSITKS

SEQ ID NO: 76823 - protein, 454 aa, Ureaplasma urealyticum
MQLKIKEIFNQDYVKLEGQKIQIKAWVRSNRDSKKIGFLVLNDGSSLTNLQAVYRVDKIDNYEEIAAARMWAAVVIEGVIKLTPTAKQPLELEVLNAQILKQSDEDFLLSNNDLNLETLRLNAHLRPRTNLFHAIMKVRATLAFAVHEFMNQNEYSWLAAPLFTGNDAEGAGETFSIQKFDNEEFFGKQTHLSVTGQLQAEAYAQAFGNVYTFGPTFRAEKSHTNRHLAEFWMIEPEMAFVDLKGMQDIVEDLVKHVIKAVLEKNQQELEFLAQRNDENLIKKLQKVVESKFERIEYKDAVKILADAVKNGHQFENNEIFFGMDLGSEHERYMCETYHQGPVFLQNYPKDIKAFYMKLNDDQQTVASTDLLIPGVGELVGGSQREDSYEKLLKRCQELKMPIESLQWYLDLRRFGYYMSSGFGIGFERLVMYVTGVNNIKDTIPFPRSHGQIEF

SEQ ID NO: 76824 - protein, 906 aa, Ureaplasma urealyticum
MLKLSTNEIRKKWIEFFESKDHLFIEPKSLIPKNDPTLLWINSGVSTLKDYFSGKVKPPHKRLVNSQKAIRTNDIFNVGLTSRHHTFFEMLGNFSIGDYFKKEAIDWAYEFLINVLKIDVKKLWVTVFEDDQFTNDEWIKLGIIKEQIIKCNRDRNFWDVGNGPCGPCTEIHYDRGERFDPNKIGSKLILEDIENDRYVEIWNIVFSQFNNDGHNNYTELLQKNIDTGAGLERIACISQDVPTNFDSDVFMRITKSVEQFSEYKYDMNEYFHPNVTQNKINFAYKVIADHMRATVFAIADGAIPSNKERGYILRRLIRRTMVLVRRLNINNLLWVDAVVDAIASTMGDFYTYLKDEKTLTKIKMILNKEVQLFEKTLQLGLNIFENSIRNQELDKEITFKLVDTYGFPIELIKEICEQRNVKVDLEAFDAMFKHHQLISKANKANLKVMESQNESLMQLDVDSTFHYEIFRWENAKIITLFNEDFELVDGLDHEDGYVVFDNTCFYATSGGQQHDTGYIIKNDQQFFVDDVFKAPNRQHVHHVKNASLSMNEHVILQINEQDRKSITANHTAEHLLHYCLKHVLSPDIKQEGAAKYPHKVTFDFTYHAQPTKAQLDKLENVLNEMVQSNFDVQELHMDLDEAKAVGAAAYFEDVYKKLKGKLRVIKMGPSIELCGGTHAHHTSEIERIKIVECASKGAGSWRITMVTGHDNLAKYIHDLYVDYLNEINHLKVNLDINDHKLNDLYNAFANWKNLSIDDYDLLNEKFAELKQSLINFKIEFDKQNAKQAIIDIKNTFNTQLTNKRVHVFKNTDNKNIFNALNELINENQDTLFISFNLDDNKIQYLLAINEKFATTNQINLNKYIKELNTISNGKGGGKPYFVQGGTSEQEKLDELLTVVDKWVINA

SEQ ID NO: 76825 - protein, 147 aa, Ureaplasma urealyticum
MRKLALDLGTKSCGFAISDLLGIIASGLDNFIYEENDFTAVLAKIDEIMINYHHEIDTIVLGYPTNVYDGSKNERTYLIESFYALLKQHFLNHEKIKIVYEDERFSTKIATQRLKNSCVKAAKIKKVKDKMSAVVILESYLSKNHFN

SEQ ID NO: 76826 - protein, 806 aa, Ureaplasma urealyticum
MYNHNKIEKKWQKYWLDNKTFKFVDNPNNPKKFYVLDMFPYPSGKGLHVGHPKGYTATDVISRFKRLNGYDVLHPIGWDAFGLPAEQYALETNNHPHTFTQQNIKIFRKQLQMIGFDFDYDKEVDTTDPQFYQWTQWIFVQLYKHNLAEIQDIDVNWCENLGTVLSNEEVVLNDKNERVSERGGHPVVRKPMKQWVLKIVDYADKLLDGLNEVEFSESLKSLQRNWIGKSIGTSVQFKIKDSLLTLDVFTTRIDTIYGVQYLVVAPEHPILKSITSEQQINVVQSYIEQTKKISDLDRIADTNKTGVFSGAYAINPINQEIIPIWVSDYVLMNFATGAVMGVPAHDERDYAFAKKYALPIKSVIDTKQKLPYAGDGLHINSAMINGLNIKQSQNVLNDYLIKNHLGKKVANYKLRNWIFSRQRYWGEPFPVLFDENNQIKIIEDLPVLLPNLNEFKPSKTGESPLANAQEWLYVEIDGKKYRRETNTMPQWAGSSWYFLAYILKNEDGSYTPLNSEEAKKRFAKWLPVDVYIGGQEHAVLHLLYSRFWHRFLYDIGVVPTKEPFYKVINQGMILGENNEKMSKSKGNVINPDDIIASHGADTLRIYEMFMGPLTASLPWNPDGLDAMRKWLDRVYRLYHNLSELEVVEDLNKLNEEIIIAYHTLIKNYTKAINEQAFNIAISEMMVFVNVLYKNKVINYELLDNFLILLSCYAPHLAEELYSLNHSESVCLQKMPIYDEQKIIAQNITIPIQINGKLKHTINVLRDTNAEELVNLALACEQVKQEIGDQPIKKQIVVVNKIINFVI

SEQ ID NO: 76827 - protein, 207 aa, Ureaplasma urealyticum
MNKLGLLCEIRRSKRKREIKNVNATFKNLANRDYDGQMNDIYATDVTYIPSPTDVIENHVYLSVLLHHKTKKIVSWNLSKYNDTNLVLKHFKLTKFPKKFIVHSDHGYQYSSKEFLDYIDSINGTISMSRVGNSLDNREVEYFFSILKTEIFSNFFQKAKSLTFNELQIEIDKFINLYNNERFIKKFDLKTPQQMWDVYMNNKSIWV

SEQ ID NO: 76828 - protein, 415 aa, Ureaplasma urealyticum
MKLLKNKKFWAMTLGVTLVGAGIVAIAASCSNSTVKSKLSNQFAKSTDGKSFYAVYEIENFKDLSNDDKKSLSNIEFNAALTSAENKTESTLEKGHLVGEKIYVKLPREPKPNEQLTIISKSGLIKTSGLLISDNLNYQTEKVNFETTQPGKEQPAGKEQPAGKEQPAGKEQPAGKEQPAGKEQPAGKEQPAGKEQPAGKEQPAGKEQPAGKEQPAGKEQPAGKEQPAGKEQPAGKEQPAGKEQPAGKEQPAGKEQPAGKEQPAGKEQPAGKEQPAGKEQPAGKEQPAGKEQPAGKEQPAGKEQPAGKEQPAGKEQPAGKEQPAGKEQPAGKEQPAGKEQPAGKEQPAGKEQPAGKEQPAGKEQPAGKEQPAGKEQPAGKEQPAGKEQPAGKEQPAGKEQPAGKEQPAGKETTGK

SEQ ID NO: 76829 - protein, 1442 aa, Ureaplasma urealyticum
METKNALFKKIVKISDQLLNKISIKKLTKDKKNNLFVYFDEFVDVTIIDELHQLSKTTLMHDLQIWYINNLKEVDHKKILTFFKKISEQNANLIFLEQINDLNTKIEYNSNLNSLILKINDKLIYDHFIANKLEILNILKVWSLPYSNFEIHFENLSSLLNEKHEQAVNEIISHHIQQQKHLEQQISQQQNFYNNQKANFNYYKNPSNKTITKLIDINPLMNNAKIRAYVFLKKIDILKSGAIAYKLNVIDDSETLTIMTYLPSGEHPLKKFLDELKIDQLIEAEIDIVLDNMSKSGQVPIGKIKKICCVEDKHVKKQITPRLELNFHTKMSSLDAIISTQELIDFAVKNQLKTIGITDRNVVQAYPEIAKFSKKQDLKIIYGLETEELEDQIPLVLNVRDQNLDNATYVIFDIETTGLFPNFDEIIEFGAVIMQNNKQIGEKIQFFIKPIQQINENVTNLTNISQEMVNNAIDEKTALLKIKEIFDDHILVAHNGINFDINFINQRLLKWGLEPLKNPSIDTLMISRAINPFKSHRLGAICKKYEVDYNDESAHRADYDAIVLADVFKVMKNNLFNDFGITNLSEINTKLQTTMLKNRSFGNWINLYIKNQANVKDMYELVSISHTDMYYTRPTITTSFLANKKDKLIISNSIHESDLINALYSKNDEEIKRLIQRYDFITLPSLGSQKHLVYAKKITIENVQKAFKKLIYLALELNKIIIYSSSPYYFFKDDKKFYDVYVNTKGLEGKAHRFANEVYVPDLEYIDQKNAIDELAYLEDEKLINLIINENPVHINSWFDDSIQPLKEGLYAPKMEGVDQKTIDYVYHTAKKIYGENLPTIVEQRIKKELNSIIKHGFSVVYWISHLLVEKSMQDGYGVGSRGSVGSSLVATFLNITDVNPLTPHYLCPNCKKCEFITNADDGFDLAPKSCEQCQTPMLTDGHNIPFETFLGFDGDKVPDIDLNFSGVYQAVAHNFIKSIFGETHSYRAGTIGTMAQTSAENTVKKYFENRFNENKIIRDSTVSLYVQKCIDSKRTTGQHPGGIIIVPKEYSIWDFSPYNFPANDINETWKTTHFAFEYLHDSLLKFDILGHDNPTILKLLKDYTGIDERDVPMYDPLVMKSFSDISALNIKPSDVLNETTGAISIPEFGTRFVRGMLVDTKPKSFADLIRISGLSHGESVWLGNAQSLIKSGKLLKDVIACRDDIMTYLIRQNVEPKTAFLIMEDVRKGKKIKPEHQIILKELKVPEWYIESANKIKYMFPKAHATAYVMHAWKFAWYKIYYPLEYYAAFFSVRADNFDLFVINQGKEFIEKTYNDIEQRSKSRDPQKKVSSRELALQPIYEIVIELLARGFKISNISIEQSQATSYVIDKENNAIIPPFIAIQGLGETVANSIIEARNQKVFSTIEDLKNRTKISRTDLKNLRVLGVLDHLSETEQLTLF

SEQ ID NO: 76830 - protein, 324 aa, Ureaplasma urealyticum
MSKILIVGSGAFGSALTQVLVSNSHIVDVYGINENELNDLKENQKNKKYFQDQKLDLPINNTYLDINLALQNQYDFIIIAIPSFAIKNFVDNIKIFNLSKTIVVNAAKGLNLETKSSWCDYIKQNLKIKALVGLVGPSFAIDVFLKKPTVVNLVGNNSNALIKVKEEFENNWFKCILSKQFDAANYISCFKNALAIGCGIIYGLQNSNNSLVAFLTKGINEMQLILEKIFHKKVNPLEYFFIGDTILTCTDQKSRNFSFGLLIAQQGVQEALVNKQQTIEGLNNIKVIYEIIKTNQISAPLFQNLYKVIINALNPQDLFDKSFC

SEQ ID NO: 76831 - protein, 442 aa, Ureaplasma urealyticum
MRTIAIVGKPNVGKSSLFNRILMRRKSIVDDQPGVTRDRIYDIGNWLTRSFMLIDTGGIISSKDTYQDNINEQVLFAINEANTIIFLVSAKDGINNDDKKIAKMLKEKAKDKKIILVINKIESEKYYLNEGELYSFGFGKFFKISAEHGIGMGDLLDELVKDMPIQNNLEKQERFKFCIIGRPNVGKSSLTNTILGEQRVIVNAEAGSTRDSIDNDFNYYNKKYTIIDTAGIRRKGKIVESVEKYAVLRTKKAIERSQLILLVLDGSEPFKEQDEVVGGLAYNANIPTIIIVNKWDNIINKNSHTMEMVKKQIRSQFKYLSWAPIVFVSALDNKRIHTIFEAIEFVREQAMRKIATSLLNDVVIKANAFQEPPPFKGGRISISYIVQVQSQIPTFVLKCNNPKFLHFSYARYIENEIRKAFGFDSVPITLYWQDKNKKLRGE

SEQ ID NO: 76832 - protein, 145 aa, Ureaplasma urealyticum
MFIGTYNHSIDSKNRMLVPSKVKATLGEAIFVYLSLGFDGNIDMRLESEFNQFVNNINNLLIGSKEARNLTRLILSQTYKIEIDSASRILIPQNLIDKAKIKKDIYIIGTNDRYEIWAKEVYDDFSLNQESTLSDLAEKLLINGI

SEQ ID NO: 76833 - protein, 308 aa, Ureaplasma urealyticum
MEFNQHITVLLNETIELLNIKPDGIYVDCTFGRGGHSQLILKKLSKKGKLICLDQDQEAINFANNLFKNNTNVIVIKTNFKNLKSALSAHKIFYVDGFIFDLGLSSPQLDDPKRGFSYHKNAWLDMRMDQSQNLNAHYIVNNYSFAKLVSIFKRYGEIKYPKIIADAIVKERSIKEINTTLELVEIIKKYSPKKNLFEKKHPARLFFQAIRIEVNDELNILEKAFNDAISMLNPLGVVAIISFHSLEDKIVKKVFNNYAKIKLPKEVPINNYVNKYSLLNQKIMPSTQELNDNNRSRSSILRGLIRNY

SEQ ID NO: 76834 - protein, 1284 aa, Ureaplasma urealyticum
MQDQGVNNKAIKQKVLNLLSTDTRDSCIRTRLTKYHLDISHTFNKYELQDFIEGKINILKIRNFININTFENDVKNINSMDELIDYLQDFNLKLKDLLSTRKINEWSQDFVFYKNERIADMIKAIESQPKKFEYLSREARNIYAQTGVWPLYIAKNFLIGTTPKASNINAPLIFVDVEIKKYNGEIFLKRKNTNFIVNEKILSFLKNDYKNNIVSLNEIKNFSYLEIQTLIKKIILKDHLESIINNNEFLNLKQNEINEQFNNFFLYDAYVLGIFEPHGGAIKNDLEVIISNNIDPFDEEINNVNQQIYYKNYHFLAEENKLPLIQINRPLNIFQKYAIHSGLVKNTLIYGPPGTGKSEVIASIIANVINDLKSILIISEKKAALDVLHERLAKINFFTLFIYDTNNDDQFYNNIFNLIEKIGGLRFIENQDLNQFNDFKYKNNIISNIYYKKIHELKKEIINITSLIKNLHNEKDNNDNNFANYLYWLSRFNEVEIRFINDPLLINEINNLIENYSYNFDEIITHVKASYDFFKKYNYEFSKNNFLKFKEESEQLNKLQIDFNLITKSLYQSQTFLPRIKLLESFLVKNNMTLTSLIYDDVNLLSNTYVEANEFYTNFNHLLKDDFKKFIEDNIKSHSLFFSHLNTLKNNEWTYAFEQYLLINNPFAKKGLFKKIKGDEKKLWKQLDLLKIYINNPFLSKFSFDFLEDLIKQPIEIFNVENLVYLNNKHLLNKAYVKDLYENAFDKNLSYELIYGLKDLKLNSEQYDIIKNLIKYQNEVLVNYQFIKNTDFFNLCKKLRDANIQFSKNADEIIYNNYLDYLQIKLVTAPKQIQTKIKEIAQICRLAKKPNIVKFILKYYEILRFLFPIWISKPELVSEMLPLISKSFDYGIFDEASQMFLERSYPSIYRCNINIVAGDDKQLCPTNFFINRQENENDEFELADVDVAESLLDRAKTALWSEYLLKNHYRSNREDLISFSNDNIYNGDLHFASKNGLFDPGMEIIDVEGVFENENVIEAQKIMEVLKERAANYQKIIVITFNIKQSELIENLILQTFSFNDVVYQRFENDEIIVTNLENVQGNEADLVILSVTYAKNKEGILRNNYGPLMKKGGANRLNVAITRAADKMIVVKSIKAVDMMVNINNDNIRTFKNFIGYCDEIVHLTNQNKFNDCSHFDEEFLTSLEKTILKILKDYKKTNQQILYKLKIGNFKITFALYNEEKQKIDLLIFIEEFNEWKSYNLLEIYDQFNFLMDRGYKTIVINDYEICLNYNQVKNNIIKLID

SEQ ID NO: 76835 - protein, 704 aa, Ureaplasma urealyticum
MEFKQKNSNNPLEEFGRNLNKEILDNKIDPIIGRDEEIRRTIEILSRKTKNNPVLIGEPGVGKTAIVEGLAYRIVHKDVPSNLLDKTIIELSLSSLIAGASYQGQFEERINSILKEVKKADGNIILFIDEIHQIVGMGRNQGSNMDVANILKPMMARGEIKLIGATTLDEYRLYIEKDQALERRFTKVLVNKPTIQETLTIMRGLKPRWEAFHGIKIHDNALIAAVNLSERYINDRNLPDKAIDLIDEAAAKIKTQINSQPIYLDEIKRDLQHLQTEKAALEPEKDEKSIKRLNEILEKIKLKQDEFNNLNDLYLKEKKQIDDLKNLRQKIERIQHDIEFYQSEGKYEKASRLLYSDLPLFEKQREELENKINENNNQKMIIDSLTENEIADVIARATGIPLSHLLADEKTKLLSLNKRIASHVIGQDEAVKLISDAVIRGRAGINNPNQPIGSFLFLGPTGVGKTELAKTLAKELFNSEKALIRFDMSEYMEKHSVSKLVGAPPGYIGYENAGVLTESVKRKPYSILLFDEIEKAHPDILNILLQILDEGSIKDAKNNEINFKNTIIIMTSNIGAEALLENNKTKALLDLQKTFKPEILNRISEIIFFNKLSKEIIFKISENLLKELENLLAKQDYLIKFDDNIAQIMVEDAYSSNYGARPLKRWITKHLENEIAKLIIENRITKNINYKINYDRELDQVLIK

SEQ ID NO: 76836 - protein, 115 aa, Ureaplasma urealyticum
MKLVHGIDIIEWNREELNNPLFAKRILIDNELEYYFQLNSSREKKRYLASVFACKEAVMKALKLKYGYGDILILKTENQRQVYLNKILIKELELSISYTETYIVASVVGLINNMN

SEQ ID NO: 76837 - protein, 99 aa, Ureaplasma urealyticum
MVNDNKINEYKNKKFVANKVGYDPESVDVFLDELINELEIFINEHKNAILKIEELNEYKRKFEKEREYTTSLNNFIDLLEKVVDKKSTFDVWEKRPVRK

SEQ ID NO: 76838 - protein, 316 aa, Ureaplasma urealyticum
MAIVSVKLTSNQVDKFLILWRPYLVHNNHNYAKYTFKIDGTLIIIYNTNTCTINTHDINSFLNTFLKREDLTLFNVIKQQVNTKKNNQNVMSQSEIYESAQVIIGSDEVGVGDLFGGIVVCAVSLKKSDFKKINHLKIIDSKKLNDQQMQEIYQQIKNQISYTIVSYNPKEYNELIKEYNNAHILKTILHYKALQSEIHKHAKYSIFSVVDAFSSLKNWNQYLQKVNFQPYEPNLLIPKAESIYTSVALASIIARVMFLKMIAIIEEQFNVKIPLGSSNPLVNDVASNIFQKFGLKILKQVAKEHFSNFQQIIKNK

SEQ ID NO: 76839 - protein, 385 aa, Ureaplasma urealyticum
MEVKVKKRVVVGLSGGVDSSVSALLLKQEGYEVIGLFMSNWDTIANFENNHEFNKTHQGCESELDYQDAQAVAQKIGIPLYRVEFIKEYWDNVFEYFLSEYQKNRTPNPDILCNQFIKFDSFLNYAKNELQADYIAMGHYARVKHDRNSSFLLKAIDTNKDQTYFLCNLNQNQLQNVLFPIGHLTKLQVRAIAKKHGLITANKKDSTGICFIGERNFKTFLQNYIPNQPGQIINIVNNQIIGHHIGTMYYTIGQRKGLNLGGMNERMFVCDKDIDKKIIYVAPSSFEKQYLISTQALIENINFIEPYNPQIPIMVRFRHRQDLIIVNDFLPIKNTKNVLINYESARAITPGQYAVFYQNDHCIGGGIVSKTNIGHQKVDFLVYKS

SEQ ID NO: 76840 - protein, 257 aa, Ureaplasma urealyticum
MDQVYNIVMAYILTLIISPLYSYLIGSLNASIILSLVFKKQDVRLFASKNAGMTNMIRVHGKKLGILTLFLDIIKPITTVSLTYIIYKYALDAPFDLSNGFNQAILVYFGGIFTIIGHCYPIFFKFQGGKGVACYGGFLITVDPIVALIGIITLLVILLITKYMSLSAMITATFTCFLVLVPGINYIPYYNQNFTTYFFDLNYVIKGIWYVWFFLLVSASLLIYRHKTNILSIATKQERKTILFHTKSKDNLSDVNK

SEQ ID NO: 76841 - protein, 900 aa, Ureaplasma urealyticum
MKDYKSTLNMPTTGFEMRANLNVKEPKIQQFWVEHQIYEKLLTKNKDKKPFILHDGPPYANGNIHIGHALNKILKDFVVSYHNMNNYYSPYIPGWDTHGLPIEVALSKKIKLSNLSVNERREQCKKYALEQVNNQIQQFLRLGMISDFKQRYLTLDHNYEIDQLKLFTYMLKKGFIYQDFKPVFWSWSSQTALAESEIEYADRQSSAIYVKMKVVDHNDLFTDKPTSLVIWTTTPWTLPANLAIAIHPELVYSLIEYKNENYIIAKPLVETFVKKVGFEDYKWIKDFKANTLEKIKYISPISKKHAFVIMDEYVSANDGTGLVHNAPAFGLEDYYACKKYGIETVVMIDQFGKYNALVNDLELENMFYEDANQVILNRLMNEHLLIHHEVITHSVAHDWRTKKPVMYRATKQWFVSIEKILPNILQTLNNDVKSTSFRGIERMHEMIVNRKEWCISRQRVWGVPIPMIFDENHNAIMDHELVENIINVLNEKGVNAWFDLDVNAFLTPKYLSMKNKTFYKEKDIMDVWFDSGSSYNILGHYNLNYPADVYLEGYDQYRGWFNSSLITGTILNNRAPYKYLVAHGMVLDGEGYKMSKSKGNVVDPLDVCKIYGADVLRLWIANSDYQNDTRISEEILKQNAEIYRRIRNTLFKYSLSILNDFEPSVDFSFNVRQEEQFVLNEFNELHIKVIKAYENFDYQTVVKLFNKFILDLSSWYFENIKDDMYCLAINDPIRKQIQSAVYWILKNSLIDLTPIIPHTTEEAYSFLKDANKKESIRLEDFYDQSQFQFKKGIAHVKAFFSIKDQIFNELENARKNNILKKNNEAFVTIAKNLILDDYLINNPKLLAKWFGVAKIEFANNTNVANANFKKCLRCWNHFPDEEMYNDELSMNCYKVINKIK

SEQ ID NO: 76842 - protein, 320 aa, Ureaplasma urealyticum
MNDNYLILSIESSCDETSLALFENNKLIAHKISSSASIQSLHGGVVPELASRYHEQNINHLFNEILNETKINPLTITHVAYTAMPGLPGCLHVGKVFAKQLAVLINAELVPINHLHAHVFSASINQNLTFPFLGLVVSGGESCIYLVNDYDEIKVLNQTHDDAIGECYDKIARVLGWKYPGGPIIDKNYQENLATLEFIKSQPAAKDFSFSGLKTAVINYIHNAKQKKISFDPVVVASSFQKFAINEIIKKIKYYLNLYKLNHLAIGGGVSANSLLRKKIQSLDVISYIPEMIYTGDNAAMIGAYAYALIKNHKKSILIK

SEQ ID NO: 76843 - protein, 376 aa, Ureaplasma urealyticum
MKYKKIITSESVGAGHPDKICDQISDAILDECLAQDKNSRVACEVLACNRLIVIAGEITTHAYVDVVKTAWEIIKPLGYNENDFTIISNVNKQSVDIAQSVNKANKDLIGAGDQGIVFGYACDETPQYMPLTTVLAHELLKEIEKQRRNKEFVKIQADMKSQVSIDYSNCTPVIETMLVSIQHDEDYNIEYFNKKVSTIMDQIAIKYGLNTDFKKIINSSGRFVIGGPIGDTGLTGRKIIVDTYGGIGHHGGGAFSGKDPTKVDRSASYFARWIAKNVVAAKLAKQCEIQLAFAIGEPQPVAMFVNTFKTNLVDEKKIFEAINKSFNFDIKTFINDLELWTTKYLPVATYGHFGRDDLNLSWEKLNKVQDLIKYSK

SEQ ID NO: 76844 - protein, 275 aa, Ureaplasma urealyticum
MPELPEVQTIVDYLNHHVLDIFIKKTIVHLPKILKNKTPQEFEKLLINHKIVKIKRLGKYLLFFLSNNLVLSVHLRMEGKFYYQAKEEWFNLAHTHIIIEFNNGMQLRYNDTRQFGTFHIYEQQSFLDSKELKKIALDPLDNNFSAQYLYEKLKKSNKAIKTALLDQSVVSGIGNIYADEILFAAKIFPTILAKNLTLKNYEKITKEAQRILLLSIKNKGTTIHTYKFGNDETGLFQKMLLVHTHAKEPCQICGTIIQKTKVNGRGTYYCPNCQN

SEQ ID NO: 76845 - protein, 289 aa, Ureaplasma urealyticum
MKKAIVIDGNSLIYRAFHATYKQAEWAVEKQLMPTNAIKLVASMIFKILNQEQFTYGLIAMDASKQTFRAQEYAAYKATRKPMDAKLIVQLPYLKKLFVAMGFRIISQPGIEADDFVGSFSNLMNKFDVDTTIYSSDRDMLQLINKNTKLKLLKTGTSVMQEINLTNFSLLNNGILPYQIIEYKGLVGDSSDNLIGVKGIGPKTAINLLLKYDNIENIYTNLEKIAPSVKNKLIEHKDMAFLSKKLAAIQTDLLFDEKLENFVLKPYNTQELDELFTSLKINNMQNYYK

SEQ ID NO: 76846 - protein, 969 aa, Ureaplasma urealyticum
MFINLNVHSHYSLLNSTLSIDDLIKYALDNKQPYVCLTDLNNMYGCIEFYDKAKAHNLTPIIGLEFEYQNATLVAYAKNYNGYLKLIKWSSWIMTSKEFEIQDDFDDLIIVCKKGTIVFKSPNFYQTHDQNAPNAIALQSVFYANKNDKIVFLAMLAIKNDLKLEDFKNCCDFDNNHFLNDNLAQSFFSPIALNNLNKVLNELKVQIHDLPINIPVYDKQNSIISSEILKQLCISGLKKRLNANDGQVNKIYVQRLKYELDVINEKQFDDYFLIVYDFINFAKSNGIIVGPGRGSAAGSLVAYCLHITDIDPIKHNLIFERFLNPTRKSMPDIDTDIMDEKRDLVIEYLFEKYGNDHVAYILTFQRLKAKMAIRDVGRILGIDLKVIDKICKNIKPEYDEDLDLAIKKNTILKEMYLLHKELFEISKKLINAPRQIGTHAAGIILSDSLISNIIPIQLGINDRPLSQYSMEYLERFGLIKMDLLGLKNLTIIDNVLKMIYENQNKKIDLFNINYNDKFVFEDLAKARTNGIFQLESPGMKKVLLKVKPQNIEDISIVSALFRPGPQQNIKTFVERRFKREEFSYWNEATRKILEPTYGIIVYQEQVIELVKTIANFDIATSDNFRRAISKKDEKILIQLKDDFINGALNNNYKQPLVNQIFEYIFSFAHYGFNHSHSLAYSYISYWLAYLKHYYTLEFLSVLLSHTSASKDKLLSYLNEAKEFNISIKGPDIQYFSNDFVIDTQKQIIRFGFKTIKGFGDELLKKIKSALQKSTLSDYISYIDALKKGNVSLKNIEILIRVGTFDSFGINRLFLLNNLNEIFEKTGLNGHFFDLNLVGLDYAKDMSVNDRYLDDEIQYLGIDLNSLNYANYKTEIDYNKLKYTIKDFYEINTNYETNILAQVLNIKQSKTKNGNDIFYLETLIDNKKQTLTIFQNSKYLIDEISIGGIYVFGVKLLNHFNFIVNIKQRI

SEQ ID NO: 76847 - protein, 206 aa, Ureaplasma urealyticum
MKRPLIIGVGGPVGAGKTMLIERLTRYLSTKGYSMAAITNDIYTKEDARILLNTSVLPADRIAGVETGGCPHTAIREDASMNFAAIEEMCDKHPDLQLLFLESGGDNLSATFSPDLVDFSIYIIDVAQGEKIPRKGGQGMIKSDLFIINKVDLAPYVGANVEVMKADTLKSRGNKDFFVTNLKTDEGLKSVADWIEKRLQLALLEE

SEQ ID NO: 76848 - protein, 250 aa, Ureaplasma urealyticum
MKEKKLNLKKHLNTVVTLNSDYLNLLDLMQITNANFPIGTFSHSFGVETYIRKDIVFDGESLIKALLLYMNEQLLHGDLLAIYQIFKLLPKQKINAIWEIDQMINFQGLARETREGQRRIGQQMVKIYNELFNCELLVEYAERIKNKKSYGNPAVAFALLAMHLKIDLKTALYTHLYSTVAALTQNCVRAIPLGQVKGQKIIYQLKHVYFDDIVNKVFTLDFKTDFCKNIPGLEIAQMEHEDTPVRLFMS

SEQ ID NO: 76849 - protein, 598 aa, Ureaplasma urealyticum
MFKISRKNYSDLYGITTGDSVRLGDTNLWVKVEKDLTTYGEESVFGGGKTLREGMGMNSTMKLDDKLGNAEVMDLVITNALIVDYTGIYKADIGIKNGKIAAIGKSGNPHLTDNVDMIVGISTEISAGEGKIYTAGGLDTHVHWLEPEIVPVALDGGITTVIAGGTGMNDGTKATTVSPGKFWVKSALQAADGLSINAGFLAKGQGMEDPIFEQIAAGACGLKIHEDWGATGNAIDLALTVADKTDVAVAIHTDTLNEAGFVEHTIAAMKGRTIHAYHTEGAGGGHAPDILETVKYAHILPASTNPTIPYTVNTIAEHLDMLMVCHHLNPKVPEDVAFADSRIRSQTIAAEDLLHDMGAISIMSSDTLAMGRIGEVATRTWQMAHKMKAQFGSLKGDSEFSDNNRVKRYISKYTINPAIAHGVDSYIGSLEVGKLADIVAWEPKFFGAKPYYVVKMGVIARCVAGDPNASIPTCEPVIMRDQFGTYGRLLTNTSVSFVSKIGLENGIKEEYKLEKELLPVKNCRSVNKKSMKWNSATPNLEVDPQTFDAAVDFNDLENWLEQSASELAKKLKKTSSGKYILDAEPLTEAPLAQRYFLF

SEQ ID NO: 76850 - protein, 101 aa, Ureaplasma urealyticum
MNLSLREVQKLLITVAADVARRRLARGLKLNYSEAVALITDHVMEGARDGKLVADLMQSAREVLRVDQVMEGVDTMVSIIQVEVTFPDGTKLVSVHDPIYK

SEQ ID NO: 76851 - protein, 387 aa, Ureaplasma urealyticum
MSFFKKKNDLQKEEHKHVSVVDMNEILSYEDSEEFKNDEIDSNEPIFKLNNVSLGYGKKMIIKNLTATIHRNDFVVVLGPNGSGKSTLIKGLCRINNPSSGYIMYRDKLISRPLLPFLWLEKAWSSIVNIFTKDRKEVIETIDWHIQNYKKIHAYKSKELALNLAYVPQLAVFPEATSIYDFVKMGRFPSSNALGINTNTEREKQIIDEALKNVGIYEFRHKNLEDLSGGQKQKALIALALAQDTETIVLDEPTNHLDIRSQLEIIELLHKLHHEMKKTIVLVIHDINNGLKYAHKVMIMKNGEMVRYGKLKETIDHEILLDVFGVESIIVKNESTYPQVSVTDFSLPKDYKINEIKENEKTNSIYNDGDEVEIENELEKEVDKTKK

SEQ ID NO: 76852 - protein, 149 aa, Ureaplasma urealyticum
MINLNIITRDNYYYEKIGNNKPKKLENLPFNIPNNWIWVKLNNISNVISGYSFKSSKYTSSGIRIIRISDFDSKEVDNNEPIFYEYNEKFNSYKIENNDIILVMTGGTVGKNIIIKKANDYYLNQRVARIRTFNVNYNYIYYLINTTYI

SEQ ID NO: 76853 - protein, 472 aa, Ureaplasma urealyticum
MSKKLEKITTRKENFADWYTSIVNNAKLIQYTDIKGMMVFQPNAWAIWEAIKNQIDVEFKKHGVRNLAMPTLIPLSEFQKEKDHIEGFAPELFMVNQIGDKKLDNSYAIRPTSEILFCNYFKNIVNSYNDLPIKNNQWCSVMRAEKTTRPFLRNAEFHWQELHAIFASENEADSFAKVILDVYTDFVQNYLCIPVIKGLKTPWERFAGAQKTYTIEAMMQDGQALQSATSHYLGQFFAKAYDIKFQGQDNQMHYVHQMSAGLSTRIIGALIMVHADDQGLILPPDIAFNQIAILTIFSNKNPQLLKISQQICEQLNNYRLFEDHSDKGIGYKLAQQEIEGTPICILVGAKELVNQQVVIVRRDTHEKINVDLTDLKLIIPKLLADIKRNIYEKAKKDLEDSIVFVNNIEELKQVIAQNKMAKAFFDGTKEDDEQIKLLTNASTRCIFDETQNGQCFYTNKKTNKLTLFARAY

SEQ ID NO: 76854 - protein, 155 aa, Ureaplasma urealyticum
MASYNINDNLLLRKIIMQHYEHPKNKVCFVQDEINYLSYHNTTEGCGDDITVYVKLNHQKIIDVVFLGTGCAISISSTDIICELVKNLDLNNALLLINNYLNMIEGLDYNKDIMQELIAFYNVKKQMNRIRCARIGASALKMCLKQFTDKHKTIV

SEQ ID NO: 76855 - protein, 772 aa, Ureaplasma urealyticum
MILSLNLLHKISPKLKKIPLNELCAALMDLGCEVETINSIKPSTNLVFAKVLEKTRHPNANHLNLVKVKANQKVYEIVCGANNFSVHNWVVLAKLNAELANGLKITPRELRGYVSNGMLCAYSEINPQATSFLTSTDLDGILVLDDNYDHYKTPNQIFNLDDVILDLSIPSNRNDLNGYFWIAKELCAYFDFEYVVDATINHRPHKEIIDVRILSDDVNSYGIIEVKNIQNYILKWNTKSILINNQIKVLNNFADNMNFLTLLTANPLHAFDARKISGQIVVKNAEEDAILLGLDQKEYLIKKGDLIIVDDQKILALAGIIGSNDSKIDATSTTAYIECANFNPMLIANTARRLKINTAAAMRFSKPLTNYVTKVTLKKLLANFKSDAKLIYYFKHSVHNVIKNKINQVSDFVGAEIDLDTAQTFLKRLGYKINKSNLITPSHRYDVLNEFDVYEDIMKKISIQEIKPQPISFDILNFENNLAYDFEKKVSDFLVDQGLFECKTYNLKNQTQAHEFNFFNFKQAYEINNPTSNMRSHLKLNNLNSLLEVLEYNQNQKNELENIFEISKINPVDSSQQTVLSIILCKPLINSKINDSLIVNNFVTTKALLHALLTKLNIDYAYDKNHVVNELYDNNQLALINANKQVFGFIGQLKNQVKKTYGLSNDIFIINLNLTSYLNQKQVITKVIKPSMYHDVIRDISVKLASDVDLNNIIANIKKIKNIRKVEISDLYIKDDGIIYTFKYYINDHLSNLSSEQIIIIEQEVNNYLKQF

SEQ ID NO: 76856 - protein, 333 aa, Ureaplasma urealyticum
MDVINLIKNLKQILRTANNERHLIELKNIFVKQHLLPLYDELKKSANKKEMGLLINNFKQQIEFVTDQILKELNDKDDQVDLKKWTNKTLFAPFINNGHHHILNSIIDDIASFFKKLNFEIVSGSEVVSPIYNFDHLNIDENHPARASADSFFINSIKMLRTHCTTTTAQFLENNVNKDIRIMSFGNVYRKDDDDATHSHQFNQVDFVWVKEGLTVANLKWLIDSLIKYLFGQNLKTRYRLSFFPFTEPSFEVDVQCFKCDLKGCAVCKKSTWIEIMGTGMLHENVLKAANINDIRTGMAFGVGIDRIAMLKYEIDDIRYLYSNNFKFNAQIK

SEQ ID NO: 76857 - protein, 255 aa, Ureaplasma urealyticum
MNNDLIKYLQWLKNDFIKFLNDAQTNNVILGISGGIDSTLTLAILNDLKKEYDLNIYAYFLDIHNSSLDYECINELKNIYPNIEVINLVDIYDSYCKMINKKTNDKYVLYNLKPKIRTNYLYAMANAYKGVVVSNLNYDEYILGFFTKYGDSAADYYMLIGLLKKHIYELGAYYHLPNKILNRAPTPANEDDEHKTDESFFGFTYNDLDQFLLYRKINPKIVSMIKKRYETNAHKHFVFDKKKLFLNYKLGNKHE

SEQ ID NO: 76858 - protein, 435 aa, Ureaplasma urealyticum
MAFIDKCKIVLIAGNGGDGIVSWRRETHVPEGGPAGGNGGNGGSIWFVGNHNETSLEFLKYKKIIRAKHGEKGDIKNQHGANAEDVFINVPLGTVVYNPITNEILADINIDQQKYLVAQGGLGGHGNTHFKSPFNKAPNLYELGELGENVEVLLELKTIADIGIIGLPNAGKSTLISTFTNAKPKTANYMFTTLNPVLGTIYRDQNRIIFADIPGLIEGAHTGVGLGHDFLKHIERCFLLIHLISLDPNDNPDIINAYETIVNELKQYKQNLVNKPIVLVANKIDQIGALENLQILKEYLKNNQEIKIISALTNLHVDNMLDDVIKIYFAQKKIYEQRLKEQLPVDQILKWTSDIPKSKELDKTIEIIKVDDHIFEVFGEYLKYWAHRIPLKTQDNLIRFNQKLQSINFNQQLLQAGAVAGDSIKIYDITLEFEE

SEQ ID NO: 76859 - protein, 642 aa, Ureaplasma urealyticum
MANKYDGNAIKILEGLEAVRKRPGMYIGSTSSTGLHHLIWEIVDNSIDEVMNANAKNINVILHEDNSISVLDDGRGIPVDINSQTKISTVETVLTVLHAGGKFDESAYKTAGGLHGVGSSVVNALSSWLICEVYRDQKIYQAKFINGGHINQSLKVIGTTKKTGTLIHFLPDPLIFKNLVFNPNIIKERLHESTFLIKDLKIIFEDKINKKKYEFINNQGLIDFIKFINEAKKTFSDVIYFRSNINKIDVEIAFQYSDQNNEIMVSFANSVKTSEGGVHENAFKNALTSVVNNYARKHNLLKEKDKNLEGDDIREGLSSVISLRIPESLISYEGQTKNKLFTPEANEAVKKTIEDNFSFWLEENKTQALDLVNRAILARDAKLAAKRAREETKKVKKIKEERGMGGKLTPAQSKDPVLNELFLVEGDSAGGSAKLGRNKKYQAILPLRGKVLNVLKARLVDVLKNEEIASIFTCLGTGIGAEFDLKKLKYHKIIIMTDADTDGSHIQVLLLTLFYRFMRPLIENGNIYIALPPLYKLTNKNNKKFFYAWDDVELDQLKKEQKNYEIQRYKGLGEMNADQLFETTMDPNNRLLLKININDILQAERQINTLMGNDVSIRKQWIDNNIDFSVIDELQINNEESK

SEQ ID NO: 76860 - protein, 850 aa, Ureaplasma urealyticum
MSVNHQKIINTPLDNIVGESYAKYAKYIIQDRALPDIRDGLKPVQRRILYAMSELGIFYDKPYKKSARTVGEVIGKYHPHGDSSIYEAMVRMSQDWKNNLCLLDMHGNKGSIDGDNAAAMRYTEARLSKIASVMLANLKKDVVKFSPNFDDSEKEPSILPSLFPNLLINGATGIASGYATNIPPHNPNEVFDALIYRIDHPDCSVEKLIEICPAPDFPTGGEIHDLNGCANAHKTGEGKFIIRACIDFKINDNKINQIIISSIPYETNKALIIKEIEDIIYNKEVAGLIEVRDESDAKGISIIIDTKKDINLENVKNYLYKKTNLEISYNTKFIAIVHRTPTLVNLSTYLDAQINHSLDVINKVDLYDLNKILLRIEIVEGLIKCVDLIDEIIKIIRASESRQDAKNTLIQVFNFTNNQAEAIIMMRLHNLTRTDIFDLKNEWQTLQDEAKTLQERINSLQVRKNYLKQKMIEFKKTFGFERKTKLFDELVKVEINEDQMIEKQNLNLVISRDGYIKTVSKKSFESSKYDELGLKTNDILFYHNIINSHDKILIITSKAKLINLVAHKITSMRWKDVGEHLNNYVKFDANEKVIAVYIWNEQFKIDEYQLVLASRLNLIKRIELSELDINKNSKQISIMKLNDNDNLISANLIKKGHNQFIIAISKLGLALLFLVHEINCLNRLAKGIKIMKLKPNDEVSAILITPNNGYNVQLFLERGSKCFNISELKLSKRAATPTNLYPITKKVQNVLAAFLVAHENVFYLLDQQQKINPYYLSNPKPTKLDTKISIYENDQMITDVVKDCFLSDEAISDFKKINMYANEFDNEMLKINKNHDDSQLELIDEEEEKK

SEQ ID NO: 76861 - protein, 361 aa, Ureaplasma urealyticum
MITNKKCKGCGAFLNDQINTIGYTPKINETKTNLCQRCFKLIHYNKLEKVSTNLNQSIKETINTLNFSNLQIFAVLDILDLEHTIIDELKEYQNKIIFLVNKIDLLPQRYNSELVNENVVKTLINHGFIDPKIIYVSTHSNTSLKKVMDYIKNATNKKQKSIFFGKSNVGKSSLINALLALNKIKTKLTISSYTNTTINLNKINIQEHQILDAPGVCFDENILNYVRDEDNKSIMISYGAKAINYQINPQQALMISGLVGIQYLKGQKTTFTLYVSSQLDIHRCKLENFIMNFNKRYLLAKFNYLNQDLEFVDHLITLNKDQKTNICIAGLGLLVINAHAEQICIRLPKSVGLKVAKYAII

SEQ ID NO: 76862 - protein, 118 aa, Ureaplasma urealyticum
MIGLIVALNSEIKTFFKQIKKKVYQINNIDFYLCTHQNIEFVLVFTDVGKTNASFITALLINNFKPKVILNVGSCGALNDQLQVLDIAIIDQCQYLDVNVSAFGYLKNQIPRLDNFLF

SEQ ID NO: 76863 - protein, 1313 aa, Ureaplasma urealyticum
MKVNKIIMKKRVNKIYKHNMFILLATLNLVWAGVITGIVLRLKSKDYSKHTILKKYYSFDKNGNLILKGYLKPHDNTNYVFGIFSDESNQEHKIQALVNDKKGFEFNTKSLPLNHSYKLKKVTSINDYNHVLLTNDDLVSQQKICFSKPVDAKVNFINNKKVYQVKLNTLLKNTLIQLTLKDLEHNVYKITAKSNDMGEVSFDVSQLKNNNLYEVIALQTQDQTKIVNVNEIEYNNKIINNLNIDELNTPYQYSKNGHLNLIAKIPLRYANEQVYGVFEDQNNQKHLIPAVNKNDGTIMFDTQVLTKNPNKKYHLQKVVLAKNQNQILIHNFDLVSNQKQDIFLKEYKVISISALENDADKTKREINLKLSNIKNDWVNKQIKVIYSSSDGSDVQTQPLVLEKNQTNYVLKLNNLKANRLYTLKAVELINNNGKTNLPLDTNLTNSFMVERTSAVLATSISEISNRLGTALTNAQVKITLKDVDNVLLANQKAIINYGNNQKSEATVIVNNGVKYLIATLTKLTLNTPTIIKSITFEQKPTCAIENIGLDKTNNIIYQNTHEAAIPLVINNNFEINGPLASSHESLKSINASDAKKVNAINLTLDFNTNEHIYKNLFFKLKYVPIDDQGNENIYDASEAIYSDVLSANNIIANKIQFSLGNLQTNRKYKLKTIYYLTSKTTPLDDHNVVMIKPNVKSEIIVAPNDSTIVKYGNWNQDSITNGSKAIFKINCNDGDILSEDLSATLVYESNDPHDLQSYTTKLKKVNNDWVIDFNLNNLKPQTTYHLKSITIAKPNKAYTNLKIQSLPQVDIKTQLPNLILHDLKATSAVLKWDSTNNGKNNHQTIQATFSHVSANYDNLNVKLVYEYNYRGDIKAVESDLITLKKDQNVYQINLPISVPNRKYTFKKVLIQERNNLNNYVDLNKKINLTDSFVVSPGKTTFEWTQPTSDQISQTTLKALKIKILSEDKTLDNNVKVIVWFKSHTDSNDALKWTRGTWEVNSDGSEAIINQLNNLSGFKAGTQYYLYKIAFVDNLQYGNTQANDNKVIYEWKANDTKEYEFTMKNAPTILQSIKFENCDANGVINNEAEGIAEFSMTTNKVNDDFANRKVKFIYHDNNNVAYETDGFPLSRSETSLHFSLSNIPNNRDYTFDHAEIETSPNSNKYEIWHSQNKIISKFKLKPAQTSVKYIDKQERNNNNVDFELHLGSRDCAFENNQKYRVTLVSVDALQTEISKEFLLSDVKLDYQDGNIGILKCHFDNLIPNTGYTLKEIKFLANPNEQQSAKPHKVIKPFNDDNNVIIDKNYSWKWYIYPS

SEQ ID NO: 76864 - protein, 616 aa, Ureaplasma urealyticum
MKHKKYKSIWLKLSMISAIPLLATIITTCAKVDTKQKAKEELQSSLNKAVLLKEIVDQSSYEDFKKIYNQTLKSNLENINKLSEQKLKQEQQTIKNLITQVSVLNELDSIKNMSDLIDVVELENTKKQLQDFLNQYEKLLNQASVDTTIIDKLKSDAHQKRLDTKALIQKTILDLANKIKSLIKTSGLNKNIVELENDIQKLVNNDTKANFKKLYEDFKLIYTKLNDINDLINKELKALPFIKKLDDIVNVINTIYEQNHHFLWFDQTKLTNLRQILIKNINHVLNVKKTLEIKEIKTLTNQLLVDLQNYLEGLKMIALESENSVNKLISIIESLQPDDYNPYYSIEKQENKQKDENNSQATYNGLEHQIKSLKSIINLFDFNITNLSIDAIYNLNDELIKKFQKANSQINDVVIKIKQTILSNFKQIYLFKYFIKHLKEFNIELNNENDPIKKANRIQTIQEVLKSYEKDLFLNTKINLKLAPNEVLTVNNLEKIDLTYASDSLQKPQELIAYLELNNNQEREFSKELENLSVRVFTIIDKKLYIPKAKELIDESKKIIQTKNEHTNNKAKLQRLEKFTSFVEQGISNENVSSYTLNLYIQRLTKLIEEIKKPQH

SEQ ID NO: 76865 - protein, 4688 aa, Ureaplasma urealyticum
MNNKKSKKIQTIKNDNNKKSRKQRLFLLLATLNLAWAGAIIGIVLHSKNNNELSNNDFYSFNDDGDLIIKGQLPKTYINKDVYGVFVDENNQEYKIKTQIDSYAKFEFDTKYLPKTGKYKLNRIIDLNNNIVRENEKLKPEQKIEVLKPVPTNVYEDQKNEKHIQLKVNKILANKILVAKFVNQNNEVYSIEAHVGLDQKIDIDTSSLKDGNVYYLKDLILKDSNPLTKVVNVNDIDEQFKKIDKTHTYDNEGNLVLKVDLTNKTKNQALPTAVFKDENNKEYLIPALSVKNNVGYFNTKKLPLNHKYELNRIVNNNELNDVLVPNNELMLEHKVSVNKPTKAKVNFIDNKKVYEVDLGVQLKNTPLELTLEDLNHQTYKINAKTDEKGRAVFDISSLGDNNLYEVIGIKKTNEVDVVNLKQIPYHNRSINNLNSNALNTPYQYTKNGDINLIAKVAPYYVNQQVYGIFKDQNNQEHQILAKVKKDGTIAFDTGALNNNSNYSLDKIVSVSNPQNVLVSNFDLTSKQKQLIKKPAANASVDSTKKTQILENLNNDLINQKLVATFVDNNDKEYKVVANVDQNNKIIFDSNDLPKGYIYHLAKVENNDLNKVINLNDFELKDKIIDKRDLNLLDSHPDFTYDNDGNLEIHTQLANDLNDDLKQKALNNANVKGIVVDQDGIEHEIDVSIDANGKVIIPTKNLANNDPTKPNIYTLKKVVLKQNNQPNIDLISEEQLSGDNHISFKKPTITAKTKENDDYEISFSNPSLANKKIKLTFKTDDNNTNTKTVEASIGLDGKAIFKTSDDAIFAPDHKYTLTKIEADNKKVANIDEISPLDRIVNKQKNGNVNADNKHEFKIPDQKNKDLTAVYKDKNNNEIHVPIKTDDKGKVIVNPNNNLFDPNKIYDFDKIVDLNEYPNKTILDRNSINKDVSAINDGVDQARKLVLKAPAVSNVTVNAINFQVNLFDLNKLSYNRQFALTIAKVNDLNDTQKYIATYDPKTNNYKLNFDFTHLDANTKYKVVDVELLELNNKEKPIKLIKDDVLNFEFTTSSATTINPPIWTKFDVVVKTNNDTTITFEIDDKDNILKNDQKIYAQLALMDDDLLDTDVINPLVNFSKTNKIASINGLDLKGNSKYSIKNLYYLNDQNQKVYLFKNDVTKYEQHFITNPHKINLSFNKSAVEQDIFADHANLFIDYKDYDQKLRINEDVKIYYQNIDNTKNELQIGYGKVVANNKIKFNLVGLKEKTTYVIKKLEALNKSASSIVNSEFDLLDPNTNFSTSNKNTTLVGLNSIDNWNNDQTPIINAKINIGDDFQDNQQVKLIYVSNDNKEIKSKAVTLIKGQRNYQFEFSNLIKNRLYTFSKIVYETNNQTLHKLDTLTHQFSINPSNNAVSLKNNTNIEITKRILVNNDQSLISAKIEVDDIDNVLNTADKPNIVYQLENSNDANNNLKLATNAQVVVENNKKFLKFDLVSLKINQNYVIKEISFNSKPTNAYFNFTNNKTNNIVYSYDEQNKISLSNNINPTSYKPQTINKNDKSVNIDVDLQVDKQLLANQYLRLKLKQLNDNKTVWTDPILFNNNAKISFKLSNLIHNRAYELEGLYYFDDQNSVNDMTNNQISFNSKIHKPKIEFEPSLTTINYDTNNAIKTVSAHNAQVHFKLKTNDEALENDQIVEAVFAPTNNLNDQKVVEAKLNNVTNSFNEGELEFNLSGLREETTYRLIKVTFKNKPNKAYELLNKNGVIFEYKNGSQAYEFTTQKFEHKVIDVVSSTSTNTTQQEITVKIDGIQRAWNNKKLELVYESNILGDPEIKTTVDNNNNSVHLSFDKKEYNLVLNNLKPGRRYSLKKINIKEVDNGQDHEFVKEINVNNSFDVNLQSEITASSVEEINDRAPDKLNQTTIKINLKDDNDILKTNDIATITYDNEQKVDAIVKTNAQNQKYLEAIITNLVFNKNVIIKKIEFKNLSQTFIKVGKNNTNVIYDESNLNKLIINNDFQIIGPLSTDVNSTQNIVANNKHVISSTLDFKVNPHISKNLKFKLKFQNINGEVVYSPILTNSSIIVNNNKNVINFTLDNLKSNQLYRLVDVYYIDDNNDTINDKNKVPKANNVTRIIDIAPGKTTISKSNNTWNTTSTSSQFEFVINSDDGNEVLDNLEATISFKKGQTLLTPVKVNIIKQNNKYLIKGQITNLEPENRYVLESILLAKPNKTKKPLVVEILNKDDISFQTQAGNYKVIQIKSQNPSTVDTKQRIKLKLDGIQNAWNEKQLEITYSANDNSTKTAIIKLEKNKLEYEFELTNLEKNRTYTFTKIELINDNNTKTPFNKSDSIQDKFIVLSNNQVGVGNIIEIQDRDVNHLNSAKIRFELNDLDNVLSNDEQATITYNNNQTTSAKVITDQNQKYLEATFSNLVLNKDTIINKIEFNTKPKNASKNIGINDTNVIYDATNLIINNDLKITGPLHTLKEFEANNKTNISVSLELDTNNHISKNLYFIAKFDSNDGQSVLTNPIAADKIVTNNNNNKKELTFNLTNLTSNRQYIFKGLYYVNSSNQTNIDENNKFEKNSNVDYKITVKPTITTIQKNGNWTFPQPNAQKFKFNINSDENVDFSTDLDATITFSDQHDTKKTITTKLKQKDNQWYIEDTISDLAYNDTYKLDDISITKPMNAFANLKIQIENKEQISFTTQSGPTQLVSITSHDLMWNDQPNASNQQTITAKVSGVNDLYNNRKIKLVYEYRSNNQKSLVESNELTLQKDQTQYIFTLPISVANRQYSFKEIKIKTSNNNFETLNNSTNVTNSFNVNASKTQIVIDNTNLATNITSTSATITYKLKSKDHVFQVGDSIITYLKSNDDERQEISYTKTITSISSDGSEATVSFNTDQTLKEEANYKLIKVGFVRKPTLAYTNINNDANNVIFEDNNSNYNFKTLIVDHKVTNVSSNDSINTTTQTVNIDIDGIQRTWINKKIQLVYTSNDGEEILSDQKTLLWANNHYSFELSNLKHNRKYTLKEVRIINDDNKTSIIFHLKNGIADWFIVNKTQSISISSIIEPIARAKNNLQSTQIRFILNDPDNVLSNEEEAIINYGENLSVKAKVKIVGSQKYLETTFNNLALNQDTIINSITFINKPIKAATNIGIDNSNKIYNNTNNINPLKIDNNFSVIGPVQSDTNKRITLEYNNKTNVKVNLELKANDNILQNLYFIATFKDQNNETVKSSIVSYSSIKKEGKKQIIELRIPNLKSNRLYHFDNLYYLLNQDDKDLIDNNKLIRSNNVVNEIEVKPGNTTFKKNNVEWQINSNSVNFKLQVESDDEDILDNNVMADVIFSSKSNQNDTKFVNNVKLKKEGNIWFIEGIVNNLKPETEYELKSIVLTKPLNANSNLKTINPTNISFKTKPGNYGIINIESNQTLTNSQNVNVTIDGIRSEWFNKEAKLVYISNTNDEVEAKVNLEENKLNYVFNFNNLKYNRKYTLKSIKWFDGQNWIDFPNKQNLQNSFIIKGKTPISVNKLNEISDRVINNLNVAKIQFSLNDPEDVLSNNEIAEITYDTNKKTNAKVITVNNEKYLEVSLSNLEFNHDTIINKIEFITRPNKAVDSVGINNSNKIYELTNLIEETRKLKINNDFRISGPLSSNNLHLEIKNYNDKESINSSIEFTINKHIAKNLKFKLKFRNEFGHEVYSELIDGNNINKTGKQEVLFSVKGLKSNQLYKLVDVYYLDNIHQNIDETRKIFKDHNVSKEIEINPGVTMISKHGNWKSPTDTTANFEFKIETQDDNDVLNNIDATVKFKDEHNNIKQKIVRIIKENNDWLIKGQIDNLNPETKYKLENIELSKPLKTHTNLSVSINDKENISLITETGNPVLKVIQTQNDTINDTQQTINVTLSGVNSKYNGRQIKVVYKDNNNVIYESSLITLQKGKNDYQLLLSNLNSNREYRFEKIEINHISNTNNFEDLEKLNGVSNTFITQTKNTTVQWNDSSATIVGTRGVNFNFKIKSEDKILENNQQVVAWFAPKETIRDTNTWLQYTRPLKDVTSDFKEGTWAHDLSNSVNFKEETTYKLVKIQFVNKPTKAKNNINNSENNVILDNTNSINSNYEFTTKVGDHKLINITSSNNVNTNSQTINFTLSGVKKSWVGKKIKLSYKSNDTSESIHTNEVLIESNKTQYNILLNNLKRNRTYTLIDVKLIDNNNVSDFPKEGNLTNSFITTRTSAINVLNIEEISNRASTNLKSTIIKINLNDPDNVLRDKDQATIVYGNNKQAMGFITVSGNIKYLTATLVDLNFNDKVNIVNISFNNKPSIAAENIGIDKSNNIIYNNDSIPKLEINNDIIVNGPINKEIVVKNANQKNNIDVDLGLQINPKIAHNLRFIAKFKSTNNDIIETNVINGSSLVNNDGKTSIRFTLNNLKANKLYSLVDVYYLVNNNSNTIVESNKLPKLNNINYQIKINKSHTIISKNGEWSNPSDTSAEFNFLLKTDDNDGELDANATATVTFNKNGGTLKQVNVNLLKENGKWLIKGKINNLEPNSTYVLNSINITKPSNVYEDLDVSIENKRNISFTTQFGPSILNELLSTNEINVDSQTINATFSGVNDQYNGRRVKLIYRDQNNELYESNIVNLKKGMQKYNFTLSGLIANRNYTFIKIQINDDKNNSQYIDLKKQNTVNNSFKRNPSTTSIEWSTPLNITYNSAELNIKLKSVESNIWN

SEQ ID NO: 76866 - protein, 1103 aa, Ureaplasma urealyticum
MKLIKKKLLFLFTAALVPIVATALASCSNKSKLNVNVLMKDIIHTKSDHYYVVYEVNELNTSQGIYKNLTLNTNLFNPLLNKKVDRLENIHPLIINNKIYLRLARKPKINDHFITNFSNDAFPALHLIFDHNLNFIEQDINEDLNLQPSLPNTPKIDHLEINNISFTNIKQNQVDIKIKLKTVSFKDDAIHNFSLKIIKKTNHQIITSDAVFNKQKNEIDATVYNLTSDCEYLLDKLNFNNQKIQLTSIPNHTFKTLDDSDNLLKNLEITKINDNGANLTLNFKELKIKDDSDEALNNIHISLAYNRVYKKGQLELNKKHFFIDKLNKRIIVYVDELERGTHYDIKQIKINDQVLNLNNQTHDFTTKGDYAKVEAIDYETAVDKITKAVTIKVKLSEDLAFYNPNIHNFKFLIRKENDQNPIEFSEVKYDEQERLLTAVINGLDVDKTYEIDNILLNGKPVSFPNDDDYAGGYYGPINKTFKIRPDRSSIEIFKDKSFYNSYYSAFNSWFWYLSVSKKDDNERSKEVKKDYKEHLFISDITKNSAIINIKCEKLLLRKENSLKPKIKLRYHPLNNPNEWAYKEFSFEDKNCFMSIDEDQKTIKIKLLNLDNHINYEFVSFILEDVDGNYHSDNFNVNVYIGDFFDSHPFHLDLSFLKFKTNEFKKAVFSFTNTKSTSTDLNVDLQDNQYADSIEHKIKYTLEDENHNKYKFVKNLSKSETTQLNATKNIILHLFALDKNQTFKLISFEIDDDNYLTNNITVKTLNESSPHLLLNLEFNDIKNTNSTLKLTLNQAVINMPKRVDVILKNKKTNKLLYLFKTDFYFDKKTHQISTKLDNLNINTDYEISELFIDKQQINLKNINNKTFKTLDYGFDQFYLDKIDHEINQQQKNIKFKLHFSDFIFKDKNAHKMSLVLEDENNQQECIDLNAHNQLKIDYEHQTIEFELKYLKPDIKYRINSIQLNDKNLDLTWVDNQRYFNFPGILNPNLKWKVDNIKYEVNGSDPKINITFDQDIFLSNLSQDKECNIELNYVYNNSDGDTLESKIVAKINKNNNKSVEITLTNENCYWLNDLKDICSNLDSNQISTQFLKSIKINGHKIPKVN

SEQ ID NO: 76867 - protein, 705 aa, Ureaplasma urealyticum
MITKKHLTKIITILTCSTLIIGLSCLIGACTKSKSKVDDKQVLFKIKKFKTTTNSIELFLEGSAVLASHSYSVVLKEKATGDLKTINNLKLVKDNDLNKLIINELKPNMGYELVDLLINNQKQLITKLDFITSTLTQENVDQFSIKKIDWKNITNNSADLNLEFTKYFLANENQNIFEISLLNLQTQQITKFKFNYQPNSPSITFNFTQLENNAKYQIHRIVLNNKELVFSNQNLVLSNTNKQNSNPIIKDLNITKIEKEIYDTSAKLIFYFKDNKLGDLNNQKFVLKLVSAHQPSNTFSFENYVYNNSKKTLSFNLTGLQTSTKYSLNSLTLNGQPISLANLDLNILTSTKLTTVQRLENLEHESSDFWFNDENLSVKIKLYFENNVNYLKNKYLKLVYMDNANNIIVSKPVLFDPTKKEYEFSFDKVLSNRKYTFSKLVFDDLQDFSEKQALEVNTQGLNGSFNTPQAKIKIKKISYSSTDKSAKLEFHLEDDFDLVDGDKVSVKYRLKPSSNSIDTTNNTVEGLVHNHILNVTINDLESNKSYEVIDFVINDYKNKQLLNKPEFLKKNTNHHNHPFNIPLDFDTKNSDYKTKFNVNEISKSYNKETKLTTIKLKFDNIPTNPTSSNNFTFTIKKRTGYTTNLISPKTLEYDVNKKTLIAKFENIEDQIVYDFVDVKVNNQNIEFNKSLDKYFSIIHSADYHE

SEQ ID NO: 76868 - protein, 304 aa, Ureaplasma urealyticum
MVLEMIKKYGIVAIVGKPNVGKSTLINAIMKKKVSIISNKPQTTRNAVKEIYEDDESAIIFTDTPGFHEPSNKLDLFLNHEIEISYKEANVILFVTTMDKELDANDFEIINLIKEANKENIILVISKAEMAKNQDQIDERIHFLKKHIAFKDVVQISALHVINIDKLINTIKNYLHKDVVTDYFRQKAEKEDKFVITEIIREQCLLNLNHEVPHGVGVEIDESKYNQEANHWIIKASIIIEKNSHKPIIIGQNGTMIKKISMGARKQLHEIYDCHISLTIFVKVENNWRDNNNIIKSLGYKIKK

SEQ ID NO: 76869 - protein, 473 aa, Ureaplasma urealyticum
MRYKFKTQEDLVNHLKSVGFVFANSEIYNGLANAWDYGPLGVLLKNNLKNLWWKEFVTKQKNIVGLDSAIILNPLVWKASGHLDNFSDPLIDCKSCKTRYRADKLIESFNKDIHIAENSTNEEFMKVLNDHKIFCPTCKQFNWTDIRHFNLMFKTHQGVIEDPKNIVYLRPETAQGIFVNFKNVQRSMRLHLPFGIAQIGKSFRNEITPGNFIFRTREFEQMEIEFFLKEEIAYDVFDKYLNQIQNWLVTCCGLDLNNLRKHEHPKEELSHYSKKTIDFEYNFLHGFSELYGIAYRTNYDLSVHMNLSKKDLTYFDEETKQKYIPHVIEPSVGVERLLYAILTEATFIEKLANDEDRILMNLKYDLAPYKIAVMPLVNKLKEKAEAVYNKILDLNISVTFDNSGSIGKRYRRQDAIGTIYCITIDYDSFGDEHDPTFTIRERNTMAQKRIKLSELSLYLSQKAHEDFQKQCQK

SEQ ID NO: 76870 - protein, 641 aa, Ureaplasma urealyticum
MSKITNNVFLTIRNAINISDVIQNYIKVIKKGNNYWAICPFHNDTNESLSINDKKQIFKCFACNHAGDVIKFVAEYKKISYALAAQEIVQLMNLDLNLLNHLQKISPQEIKKNKVFDLNKQIQKWFINFLNNKNNIHVIDYLTKRNLNKNDLAYFKIGYAPNNDELLNLIKSNYNNLIQENDEFELNKLIENSFLVIDKNGNYHDFFNDRIIFSIYDHLNNVVGFSGRIITNEKTPKYLNTKTTAVFKKDEVLYNFHNVITIENNHQLFIVEGFMDVITIHKSNKPNVVATMGVELTNKHLELIKSYGIKDLILCFDNDQAGFLATKKQIMKLINSPFNIFIVNHKDNDCKDMDEYANKHGYSATSKLLDQQLHISEFLLLEISNTNKSTPSLKHSYKQECFTIIKKYGDIFYVDKYVDFMKQTFSIEENLLKKVIEELLINKQCNSIQNKKNIQSYQKQTQLTNKLTTSNPKVILTKIDKHFNHLVVIILMNRVFLNRLDTQVRNRLTKEQSLVINIIEDFYLYHFKINNILKNTDSFIEFINKNYSKYTNVINQLTKMVQIIKYNPKFDNIVAFELAKNNFIYEWLNNQIKRLKLINLNLNMNNNQEQIINNEKLIKQYNDEKILLDNLINASLFHKNQ

SEQ ID NO: 76871 - protein, 5005 aa, Ureaplasma urealyticum
MMVKKVINVADLDQKQIIVNKLNIGKIVNNQLVFDVPKNVEEGEDVFVNYQDVDGNLIKIPAIVNNKHQLQIDLSNNPNFTKDKIYHFDSISIEDEYHIPKETIISSDDVDNSVKTLNNEVDLGRKIIVKNPSVIQNKPTTLILTVNDPNKLALNERLKLTLALKNDPKHCVSAYGLIDYKNNSLVFDFNHLQTDTAYYIKNLVFKNNNLNLTDLNAEAHSQTKINIIKDQVIGYTFRIFSTNTLVLEDYHQYDTDPNATKLNLNISTTNKHPKTITYRLLDENNNALEPDLVANLNYDLVKKNYVAHLQNLKGNSKYLLLGFNDENNNKIHYSTPIKTPLIFGTTPHATIVNFDVNNPKQIIKSQDARIAIDFVDQDQKLRIGNPVELTYLNKNNQQVYKTIGYVKGINKTNKSGTLEFELNNLVSNNNYELLELKALGLANDAYQKVVFAPFDQKHNQFSTKLIGTYIESISSNEVIKKDENKLDVNVKIVFSQKDKTLNNVWAQLVYISKDNEVCLSQPLLLNVGNSNYKFTLTNNKPNGFLSNRVYKFVKLIYAQDQNDLQSTDAVIKNSTDLSHGFKTEPTGIISLKNNSLQVIKRTDDSIRLSIPLVDNDHVLVDSDGSSFTIKISDLDDPNNLFDADNQKIVIDQNGNRNLEFDVPNVSLNHKYHINNITLINKPINAAFNQNENHEQVYELNNSQPQLSEFGNELLVNTYNYEPNITDVKTNVLNYKVKLTLKRSLNLMNEYYLKLKYIDNNGDVVWSDPVSINNVNNEYEFNLPDKNALKSNRIYKFDGLYYFKDVNTVKITSANKVNMNNITPLQIQTASKINLNSPKVTINNITPASADLYLPLVSTDDIFAKDQVIDVTIGNKDNTKNDLMFTSNLEYDDITKTWGVKIHANNLSPEVNYQIKSVKFRQKPVLGAFNVNNSDDNHVLIDSQKTPGFSTPKASFDLVSVTASDVVDANVKTNSVHIVINNDGTSLNNCKAKIVYNDGEHDLVSNNFVVLNYGVNEYDFNLDDLKHNRIYSFKKLIYTEPNQNDYKFSFLNNQKITNTFKTASVNEQLTIDTKLVRKPDSNLNKINLKLQINDPNDFLEQDSILEITFHDEKDKTTHNVIGKINVDANNNKTLEFSVENTNTFKIQPNHKYIVDNINYATKNKIQPANAISNNSNKNSIYDASSNPSKILSFTNELFVNNINVNQPNTNLNPTASIDVELKSSQNLLKDQYLRALYIDNNHQKIWSDYASVNNVDLAHINLNFNHLTPNRKYNFAGIYYFNDQNQNNDETQGKKIFVKEHSKTYDFSTLASTTQLLEFKTHNVDEDQFNYDFNINNDDQVLEPGMLVELCFENLVDKNQPVLKTQTTLVKKDEHSFSASGVITNLLADHTYRLTSVSLKQKPQLANVNINNNNNNEILLNNIEDNQKTIHTLSKSIVNEISNLADAYPKNNNGIYDVKFNINIIKNNNKLNNKYVKVVFEDNEHQLISTNDLLVNKLDQTNLISLQNFSFSNLKPNHLYRLLKVVYGDEQNFDAINEQKNILALNPSLVNSSFSTTPAKIKVSKNAIDVWQNQALIKLILDDSDNQLHSGDEININYRIKGTQNIISTPATISDQDKRYTKCMATNLIAGLDYEIVSVTIKNQKTKNVSPIIFELPSGPIGFYTLAPVFKITSLSMDPVYHENKNTADLKINLRIENIGASLFNKDIKFIFKRKNDGKQISFIHKVTSANDANYEWEFKDLLRNREYTLERVVYLKNKDFNQSNVSESDYIDLWIYENLNKTFKLLPTKPLGIIGAPIKEISDNGAKVQLKFAINDFDDVLKENQTFKFNIQPNENNGANLNEISEHEGKVEIIDGQKFFVANLNNIKVNKEYKVYKIYFDENQDVGNGVYKINFKNDYKEPNNVVYDASVNTTQTYVFTNKFAIASFSNNLTDVDVANKQNISINLDSRVETIQGYHFKAKYISNDNRVVWTNTIPAPTNIGNNKNNIALNFELNQNQLISNRLYTFAALYYSKDVNVDENHANMVVIKNNVNPQTISTKPSSTYVDLKAQNADENKITLSLLLHSNDQIFEDKNNHLKIAKISIDELDAHDQIINSTTHDYDLTLEKENNEWLLKTQLINLKPNTKYRVKKVWFTSKPSDTIYNGVNKDNIVYPINNHNTNIDLKTLEKSTLNSVKPTKTNFNKNESIKLMVGFNKTGSSLENKYAKLVYKDNNNQQIESDPVLLNSDTTTKPFNKEFSFNNNQTSLVANRDFEFVKLIISDTADFKNANTLDLTPNFNKDDAKFSIEPTPISVNNVIQSGSNTYDEIHLSFDYDDQDHNLVDNDQITITYRKKGEQAWTSSKAGEVSVKNHKINVTLKDLTPNTTYEIGAISTTHVHSPNVKTSPIQYNETTKKQLEKLDLTTKVAHNFIKDFKLASNSKLVNGVYECAKDENVKFSVGLHKEGHELEGYEIYAKFVDKTNPNKPAIEIKSSNNINSNSNQVYEFELLKSQITPNHQYELSEICAIKNKGANNEIKKDLNENHLSLALGLAPNKMDVQKPTITITKVQDNQSVSAHVKYIINDPDGILNSTDCSKELLNVKYALFNQTQNANLINNITIKYDQQNKQFYCEFDIDNLTLNQDYGIFEISFANKPIHAAFAKINDTQHPLALLSTNNQDINQKIALDCEVNKVTINKQDLDYDQNTKISWPIELSSNLLNNKYIRVKYSVSGHKFKQDDQFSSAFKITNNKASVEIGHDKLIANKAYEIQAIYFSDQNNDFACTNTNQIPINSSITNKKIVINPSATTISSHEVKNITSTSADINCSISTNDGDIFKPNSQIIGHFAKGDDLTKTFVANGVVANVNNQTKLSFTLNNLEPNTKYILVSVEFKQQPNNAYKHINNKYNDQFYSNDQTHSIIFTTSTPIFEINSIKTIKNTYASNKEEIKVNAKFNKIDPYLNAKKLKLVYQSQNNNETFETQPLLVSTNTHDYVFSFDKNASNSIIGNREYHLDKILYLNEHNQWCELNKNNLVDQFNVEPTPISIAKIVEDDSKRTQNDVKFRIYFNDLNQDQIFNDNDNVNVKLVYPNTNNVWVSHDWPIHFDQQENKWYTEVWLSVGSLNNQEFEVGAVSVNKKPAKAKFDIHKTNHGYDNFIYNKDIKNQNYLVGNIFKVNSINVAHPSTPTDSNTTVHVKMQNNMKSAFKGKYLALKYKRNDTNELVWSSTKIKIDENIHDDLDFTFTNLAKNHIYSYVGVYCVDDQNKEVFVANNITNLNPPQIKVLTNAINTISYINANDKISNLSDNTAKLKLTLNDPDHIFKVGDELDLVFNTKINPTTPKQKNIHVSVKEIQNNEVILNDVDLSGLSENTEYELKTVSLNQENWSQKETYISSKPHFEINNVHFATIKHLFINKIEINKKAQENSYTLKLTLDGDYSEFIKQGYLRLLLVNNKNEEFNYTKSHKDTDKNQDNNAVKYFTFDLNNLTWGMQYTIKWVGLAKNNVSDNTDFKKYKLEKGYLTKKTDDLDQFTVRASKPLKIKQVNVSEIKAHHAKLNLKLEDQDSVLKNLNYELELRFGVKNNQSSNSWITKKLKTKIVNNEIVLDEIVFDNLTEDMQYELKDAKLIFNEEELKKFNKVTAVDNLNVDSDQIVFKTMKSAYVETATINFVNNTPNATIDLKLNGDLSVFSKSQYIRFEWKLNNSDPNTKPLYYTIPISSLDLNNLNWKKDFGSDLLWNSSYTLRIGYGDDNKATDDSKWTWLALEKTAKGNIKTPNAQRISINQMQTPTNYSLLTQEVNENGNKVKKALGALDLCFELNDPSNILTNQDQFSIKYAMLNNLKQSVSASAHVEIKENKKIVKFHISGIDLNQDYKVCELMLLTKPARMGENINNNDKNNYSSIYQNSTNDDNQYKFKILLENNDLSTKERPSKTGDVVNNKGKVDITITQAPKLLANKWISAAYVDNNGETKWTKPRLITTNDNNQILYQAEIDNLTTNRYYNLNGLYFGNQQSDFEQGNATYLLSLYPANLLVPTDGVRIQNIKTPATTDAATVWFQLESKDQVFDKQVLHIQITPFNEDINKKDIPAENIPVFERTYTLNGNSNSAIVLLSLNNLEPNIKYKITKMWFEQKPTKAYANLNSKANNNVIYENTNDKTQPNISFKTKTVEPKIISLVKKDQTNDGISFDLKLQHDGTYIGKPFRLIYESSKRKSDVWDEKNNNWESNDKQLIYSEPINFKAGQKDYLVQIIKDHNEYFKGNREYKILGIEWADPSFSQDKHHKKLISKDTDSEAFKNVNSNALSFSTDATTIKWYVATPKIVYNKNHKKMTFQIRYDDPDDSLFMGQRIGIEKILLPNKRKQIPLNPPLVGEVDNKKKIIEFNIDNNDDHFKPGNLYQLISIDLVYEPKTLSHKDLNKLMYENPQTKMYKDKVTFELDNSQYSSIKIEENQNPYEVKSVKNKLDNKNLTLKSTVTFNNKDEHLYNKYMFALFTNTKTNAEVWSKPIQLNTNNYSKLEFDLPNNGALEENSEYQFLGVYYNEKQTHPNKNEIEKQIYMIDNLKIINIDNRITKTIKTGIHIDVNEVQNLAQFKDGISKQFKLVGKNDSTVLNQILNGDFSINIEYKRKDQPDNEASFSTGACKLFKKNNNDPFWYFNADFNNLNFNQDYYIKSISFVNKGINRIIGSINNADNQIIYTTNNYNSSKYHIKTVGAQIEFDQTTVVKNDIVFTKGDSGGYPASVVNFKLKGKEANTFVEGQTYNVVLSTWDDPFNTRDYENKIDNHLNYDIKKDYVIVSIVAHNNCLEFKNIQLIPNQNYNIVKVLHYQASNTISAKDMGYSLKNAFSTKSVDWKVWKFGHGRNNFTWRYQVALSLKGPFTGFGGYRKTIFDLGLAKSLGVYARIYQHNTNNLAFKGYDIDGINEGEDTSLLTDFERASRPTSANVLSSSCTLANYLRRNSDSLKNTIDIGKVWYEPRINPNLPNSSNATYYSGEPKASIFKIDDQHKHYTDSFGTTNNDAMDTNNENQF

SEQ ID NO: 76872 - protein, 202 aa, Ureaplasma urealyticum
MSRYTGSIYKKSRRLGFSLLENNKEFNSGKKRTYGPGQHGNKKVKLSNYGQQLVEKQKLMFLYGLNDRQFRRLYRVALGRPGVLTLNLLQVLESRLDSLVYRAGFAPTRRAARQLVNHSHVLVNNKKVNIPSALVEVGSTIALKAKSLEIPLIKNTLNKPADFIELIDKEKKVAKLARLPERNELPADVNEAYVVEWYNRLM

SEQ ID NO: 76873 - protein, 263 aa, Ureaplasma urealyticum
MKILAIGDIFSKQGRKAVANELPKLKQEYQIDFVIANAENTTHGRGLCWKHYEELLGYGIDCITMGNHTWDHPDIFEILTTKTNIIRPYNIINTHQYHLVGSGSRVFYCNKKMIRVTNLLGNSIDMKGLQTNPFESLDKIIAFNEAPIHIVDFHAETTSEKNALFLDFKSKLSLVYGTHTHIPTNDARIVDHTAFQTDLGMCGAANSVIGANPSSIIQRFRDPNKRFILEPSDEKYVFCASLVEIDDETNFPTNITPIVIYEK

SEQ ID NO: 76874 - protein, 743 aa, Ureaplasma urealyticum
MGLGIDYSRLNQEQKEAVTADLGPQLVIAGAGTGKTSVLTLRIAYLITEKNIHPSRILGFTFTNKAADEMKERVGKTIGVSIPYLSTFHSMCVKILQQDIHYLNYHNNIKIIDTDDQEVLLKEIFDQLNIEKKSQVIKKIIKTISKVKNKFFDQNDMLNEKNHKYLELVDLNDAQRLVDIYKIYCDRCFKLNYVDFDDLINLTHKLFIEFPEVLEKWQNKFDYILVDEFQDTNKIQYDLISLLATKHQNLFVVGDPDQMIYSFRGAEQWIINNFSQNFKNTKVTILKTNYRSTQPILNTANRLIDANNNNYKKNLTAFNTNDNNLPIYLRGQNPIDEANWIARKIRELLEEGTPANQIAVLFRSNHYSRTIEQSMMRESIPYTILGSKKFYERAEIKDMIAYLKVVNDLDELSFLRIINTPRRAIGPTTFEHVKHYAINNNLFLFEALAEVEKNHLINNTQKKNILNFVNLIKEIRDEMEDLKIHEILELIYKKVNYEAYLLENEKAEDKIDNVYELKRAMKMYVDRHPDDTINDYLNSIALYLNKDGKDSKENVLLMTVHNSKGLEYENVFVAGMNEGLLPSDRAINDDPIKGVEEERRIAYVALTRAKKNLYISSACCYDPLARRQVFESRFINEIGFNNLKIINSSFKNNKPEDMPLKSFLKQQEERSWFDSKQKQKEVEDNFYQTMKNDFEIGERIVHTSFGDGVIIGIDGDILTIAFSKYRQPKQINFNHKTIVRRIG

SEQ ID NO: 76875 - protein, 77 aa, Ureaplasma urealyticum
MSINIKDLIMKIAKENKIALNMDNLNIELKSLGIDSLSAMNLIMKIEDQIGVQLPDEKLLKIKNLRDLINAFEDVLK

SEQ ID NO: 76876 - protein, 455 aa, Ureaplasma urealyticum
MTLNEKKEFVYELKAVEKNHNLKGFEENTTEHVVFGGLYQKQQYLILTPDFDSNELSRSLISFLEKSPKSVSVDLNSFLSLVPESRHASLLNVVISALEYVEVTPFSLKSKIETKNIHNLVVDQKYHDLINKLHVIAQSQTITRTLQDTPANLMTPGDFEERIKELFKDLPEVKVSVLYRKDLEAKGMNAHVGVGKAAVSDKAQPRLVVVEYNNNPETNEKYAFVGKGVCFDSGGYNVKTGSHMRWMKFDMSGSAIVSMTVRALALNKEKVNVVAVCPLVLNLLAPEGQKPDDIVKSYNGKTIELDNTDAEGRLILADALTYAVRDLKASKLFDVATLTGAMIYALGDTYSGVWATNNDIWNEVVVAADYAGELVWRLPFHNDFLKMLNSNVADIANSVSDPRGGSSRAACFLKEFTEGVPYAHFDIAITADVGHKGTGVMLRTFYRIAQNQKFN

SEQ ID NO: 76877 - protein, 767 aa, Ureaplasma urealyticum
MVSDNKNTLNKETISFYSYDNQLDAQKTESNGKEQEKSNLKTKKFKVQKNYFFNKKKLIGICFFILSFLILILAFLKAPYTGAILDNVLEFFFGWVKYYVYVILLLFLIVFYIKKVRRRLFSKWMIVFYIITLILFALIIGAVGYGIITNSLTYKFIINTNQQMINKEILNLHKDNFEYISLVNLHSKKLHLCEWWAYSWSQEFLKAIDEKHYYYTSVFAYGGIIGYANLDLYRANAWIFTIVIMFMVLVLISFILITFGTKSHLGLKFKKWLVNKIITNINNYHKKDYQLSEQNFFEEKLGEDHHNIDKQLEQKEVIQEQNLQIKNFNDRQTNSSCITKNDKLKTTILEPIVNDINQFRENPSTIKNNKYNFYPRIDIIDGKSQDYLHELKSKGENLKLIIDKFLENNQLEYHFNAINPYFSNVEIVYQFTRSSLNNFLKNFLNLMKQAVNDTDDYEINIYNDNDFLIIQAKVKDLNPQINIKDILTNLEYNDKLCLGIGKLKERKVVWLEDTQAGSILIHGSQQFSGKSMLISNIIISALYTKSPNELELFIINNGSKSLKEFAKLKHTKKSVDHDDFENVINLLREIMNDINKQNTLFADNNVDNLDEYNLKNQNQKLPKKLIIISEYVEIVSSQFNTRFDTLIRNIANIAKKHGIVLIISSNITNESTVSFKNVFDYTIVLKLNNPYESILLTDRNWCNNLVGFGDMLLIRNFDNLPLRLQTAKITNEQFANIINEINSADYDIDEYRHETRLTSRTQNFFNK

SEQ ID NO: 76878 - protein, 378 aa, Ureaplasma urealyticum
MISVNKINEKTKNTFFKRFYSSIFIFLYLLIYFVLALLADRNYNWTPLINNLYIQQGIAIVLLIWLLPLICIGSYEMNKVIFDNNKITLIILTIVFNICIYTTTISYFIYQYEFLNIKYLLTINYHYVIKLFGACLGCSYFVTLVILFFFLAFLKKINFKNCLYTILIFSFLSGFFIGLLYFTFIRSWITSLLLMMIVFLSDTFAYVGGVLFGKTKLAPKISPNKTVEGLIFGLVIATIVIMLIIFGLSYVPIKPKNGIVLKSQNVLYNIFGLDFSSSNEKNLTLHKQALWWICTIVAFLFLSLISTSGDLVFSAIKRNYHTKDYSNLIPGHGGLLDRIDSHSFVISIMFIFTLLITGSLQDENLFPNIQKFFIQLIV

SEQ ID NO: 76879 - protein, 183 aa, Ureaplasma urealyticum
MNFKIYETKIREEFELVLKWMHNEFIKLRTGRATPAILDGILVNYYGSMMPINQLANISVPEPRVLAIKPYDRSSIKDIATAINASNLGVNPQVDVDIIRLTFAAPTEEVRKNLVKKAKQVGEEAKIRVRHIRQEAQDLFKKDSTTIEDDKKFFQTELDNLTKELNKEIETVVSHKEKDIMTV

SEQ ID NO: 76880 - protein, 235 aa, Ureaplasma urealyticum
MRKQRIVIKISGACLKQNDSSIIDFIKINDLAEQIEKISKKYIVSIVLGGGNIWRGSIAKELDMDRNLADNMGMMATIINGLALENALNHLNVNTIVLSAIKCDKLVHESSANNIKKAIEKEQVMIFVAGTGFPYFTTDSCAAIRAAETESSIILMGKNGVDGVYDSDPKINPNAQFYEHITFNMALTQNLKVMDATALALCQENNINLLVFNIDKPNAIVDVLEKKNKYTIVSK

SEQ ID NO: 76881 - protein, 291 aa, Ureaplasma urealyticum
MTKAELVKELRIRTQASMSECIKALDASENDIEKAIVWLRENGAIKAANKLKNAATDGVVLAKKINNKAILIEVNCQTDFVAKNENFLAYANQILEEALAKVENKEDFDKLIINGKPIAESGLDLTAYIGEKIVFRRGEILKANDDQTLGVYTHNNNRVAAIILVDGKVEDEVVRNVAMHAAAMRPRYLNEKVVDKLWLAKEREIIVNQLEHEGKPAAFAAKIIDGRLNKILKENCLVDQSYFKQPELTIEKYLKNNNAVAVGYFSYEVGEGIEKAPQMSFADEVAAQMKK

SEQ ID NO: 76882 - protein, 341 aa, Ureaplasma urealyticum
MINLNTWNKTHSFKNPLKYQNKIAYLKTMITVIISIVVFIITLAWTYDFNFKQDNIALAYIIMQIFLSGFILGFCAYLIQKLTKNRFSDTSIMGISSVNILGVIIIAFQVDFNNFSADKLSTLEHTEPIIFFIAPIILCMLYYFTCKEQSSFNYKKMLISGVIVNFLSVALGASIAKNLPKLANAYVSRYTYGSIEPQQESFFIALVLIIIGLLIVLFNFKKIQIVSSNQDLANQLGINVKLTSGLLLVAICLMVGASYSLNGNLIFIGLMAGNMGSVISNNRFKSAAISSGCCGSLIYMLSFLLFIKILNFDSQWLNLAIPLIISPYFIYIIVKKNKSDL

SEQ ID NO: 76883 - protein, 597 aa, Ureaplasma urealyticum
MTSSIEKTPLVIKRHVFKKHYGIFTTLWEVIKDSSSFIASSLFSSLALLLITIIIALHNFSGAFAATSVSYIVVFQFSFIQLGGNIGVVLALWAKKLYDGSKHKFVPSHSTTNLASFYAFSFGLIMLGVYLATSYTYNLYANIHENTLFAQLFGEQYIWSSLGIIVLAPVHNYFLISIWTNDRRKILLTIILDFATWTICLVTSFLLGKYSILAYSGYGLGLSIGYIISTIAISIIKFSKDWRISKLGLSLNLLKISIKQIWNQTLISIFSSIIKMFVLLALYHLINQKMTNSVPLNLQTGRILWYHAMLFIQGIGLGFTDYLFYIFQKQTIRDRRYHSRQLFICVFGLLFVYLMIAAIIFGFSIKPLSVVYAKEQNEAYINLDAEIPDHFYMSIRQGILNNPRLVYFLGAQAHIDPRLILAHLTNHNPEVWKVVIKQLITPIWAAGPNFKYLYGIDNPITTSFVQISAEVVKKLLIGDNTYIHLTIFAIFYSLSLTLMRYRDLIAKKQQSPFPTLLLQVLVIAFVVGFGVDYQSSVKFAGLLAWSMPLSISSAVILIISLLMFTIVYYKYLNKNDYKDNQITNQYSFKWIRHILWK

SEQ ID NO: 76884 - protein, 611 aa, Ureaplasma urealyticum
MVFLYKRGRFNLEEQKQMKVIKKSDSYFKKNLTVFRTLLELLKESSPFIAASVFTGLSLILIVVIVAHHKDIGAYAATSISYLTIFQLSFLQLGTTFGIVFAIWSKRSFKDGKYKFEPTNDTVNAASFYSFIFGLVVLLIYFTTSYIYNHFANDHQNTVINQSVGSAYIVSGLAVVGLAPLRNYLLMLIRSTKSINVLLAIVLDFCTWTTALIAAFLLGSYSVLNYWGYGLGMSIGFVFWTIIIGMTTIEKAQIVLRPLYISKRLFVLSIKLLWIQTILSSLKSVGKMFILLITFVVINSRVVGSSLLDFQSTRILMYQSMIFIQMLNLGLSDFLFYLYQKQEVRDCRYHSRQLFFWVFILGILFALITSVIFGFSVKQLVQLYTSEQSPSYIFLEKQVPEHFYQSLRKILINDEKLLDIITSHVNIGRQEVVNALSSNDKNIWLPMAQKVIDPIWKLGDKFETIYQMKNPFTHRFVDISASNIYSYLIKNNAYILLSFFCTFFSFSSILSRYVGLIARRQRPPYVMIVIQLVMVAFTSGFGLTHQSDPHFIGLMAWSFPLFISSIFILGYSTYKILRIYRKYLKNHKYNDEKLSIMPKKQLEQQIKVRQN

SEQ ID NO: 76885 - protein, 394 aa, Ureaplasma urealyticum
MAKAKFERTKPHVNIGTIGHVDHGKTTLTAAISTVLAKKGQAIAQSYADVDKTPEERERGITINASHVEYETKTRHYAHVDCPGHADYVKNMITGAAQMDGAILVIAASDGVMAQTKEHILLARQVGVPKIVVFLNKCDFMTDPDMQDLVEMEVRELLSKYGFDGDNTPVIRGSGLKALEGDPVWEAKIDELMDAVDSWIPLPERSTDKPFLLAIEDVFTISGRGTVVTGRVERGVLKVNDEVEIVGLKDTQKTVVTGIEMFRKSLDQAEAGDNAGILLRGIKKEDVERGQVLVKPGSIKPHRTFTAKVYILKKEEGGRHTPIVSGYRPQFYFRTTDVTGAISLPAGVDLVMPGDDVEMTVELIAPVAIEDGSKFSIREGGKTVGHGSVIKTSN

SEQ ID NO: 76886 - protein, 688 aa, Ureaplasma urealyticum
MSKELKLFRNFGIMAHIDAGKTTTSERILYHTGKNHKIGETHDGAATMDWMAQEKERGITITSAATYAKWKGHSLNLIDTPGHVDFTVEVERSLRVLDGAVAVLDGQNGVEPQTETVWRQATKYNVPRIVFVNKMDKTGADFYYSIETMKNRLGVKATAIQIPIGAEADFVGSIDLIEMKAYIYDGKADEEYKIEDIPADYLTKAQVMRSQMIDDVAVFDDEVMEKYLSGEELSHEDIKKCIRKGVISTELYPVLCGTAFKNKGVKKLLDAVVDFLPSPIDVPPIKGVDDHGNPIEYHNDPNEPFAALAFKVATDPFVGRLTYIRVYSGKLDKGTYIYNATKDKKERISRLVKMHSNNRDEIDSISAGDICAVIGLKDTTTGDTICDEKKPVILEQMVFAEPVISLSVEPKTKADQEKMSLALSKLAEEDPTFRTYTNEETGQTIIAGMGELHLDVLVDRMRREFNVQVNVGAPQVSYRETFTEVADAEGKYIKQSGGRGQYGHVWIKFEPNHDKGFEFVDNIVGGKVPKEYIKEVENGLIEALTSGPIAGYQTIDVKATIFDGSYHDVDSSGMAYKIAASLAFKEAAKVCKPVLLEPIMSVDVTTPDDYFGTVMGDISKRRGVIEGQEQRGNAQAIKAKVPLSEMFGYATDLRSNTQGRGQYIMQFSHYAQAPKSVTEEVMVARAKK

SEQ ID NO: 76887 - protein, 155 aa, Ureaplasma urealyticum
MRKLKPQKRQVLADPVYNSRLVTKLINAIMYDGKKGLAQSIIYSAFEIVEQKTGKPALEVFNKAIDNVMPIIELKVRRVGGSNFQVPTEVTPERRQTLGLRWITLYARLRHEHTMIEKLAHEIIDASNNVGAAIKKKEDTHKMAEANKAFAHLRW

SEQ ID NO: 76888 - protein, 141 aa, Ureaplasma urealyticum
MPTIAQLIRNKRAPKVKKTKSPALLFTYNSLHKKTTKNPSPLKSGVCTRVGTMTPKKPNSALRKYAKVRLSNGFEVLAYIPGEGHNLQEHSVVVIRGGRVKDLPGVRYHIVRGAGDASGVEKRRQQRSLYGAKRPKKEASK

SEQ ID NO: 76889 - protein, 299 aa, Ureaplasma urealyticum
MTGEQLIKSVGNKGIDLLTYSFPCQDLSTAGSFSKKAFGMKKGSGTRSGLLWEIERILFDLQKLNQLPQFLLLENVNNMLSKQHKLDYDMWTKSLKQLGYSTCTFQLNALDYGSAQRRKRVYAISILNYDGLIDSNGNILDLEAPIFDGKQKQLKDVLKTNYKIEKYYQEAYLAQPNRTFSRIKYVIPKYDLLNPNCYCTSTITTRQDRFPNGGYINLKNTILGDDYREKDHNNLPKKANFRLLTNREAYLLMGFNEKDFEAIQAKGISKAKMYQQAGNSIVVDVMVYLMKLIQERFNK

SEQ ID NO: 76890 - protein, 251 aa, Ureaplasma urealyticum
MKKFINYLKNVKGYSDGTIAIYQKYVKVLIDNNLDYLKAIKKYEHNANVTKRVVLSAFKAYLKFINHKDAILIVMPKKEIKVKEFLTWDNFLKIINNINQATFLGFQKYLILRILFETGIRSCELLKLEIKDIYENKLKIHGKGKKERFVYLSNDLQNNIKKYIGQIKTKYLFNFSYKNLYQKVTRIKTNIRLTPHILRRSFANHCINNGINIYDLSLVMGHNNINSTSLYLNKESKLVELDHLFDNKKVN

SEQ ID NO: 76891 - protein, 552 aa, Ureaplasma urealyticum
MENTNKIFNCWLNSPKIPQVIKEEYKNKTQKEIDHIFDENYRFKFGTSGVRCIYEEGTRYLNAITYTQLTLGFIEYLETKKNFNKIIVIGRDNRFGSRENLKLVAEIFSSFDYTVYINEDYGMLSTPITSFLINQLQAGAGIMITASHNPKNYNGFKVYNANGAQPLVDDTNLIESLMPSYTEALDFNFEFKQDNIRFLTKEQIQSYFDAVKAQLINTDPNIKKPFKIVFSGHHGTTTKDMIPFLESLGYDMVSVSEQNFEDPNFNDDPSSNPEEQCSFDLSVEYADNTNAEIMIASDPDGDRMAIAVRHENYWKFLTGNQTGVLIAHYLLEHKKFTKPTYIISTFISTRYPELFAKNFDCDVLYVDVGFKNHGNLIANRKKTHNLVVGFEEAIGSLPSDINNDKDSYQTASILLEMINYYYEQKLDLFTVLKKEIFAKYGNWYSKTTQFVIDGDNWKQKALIILNNLRNFEFKTVTQYTIHNIIFHEQGSYLEWKLDEYSTIKFRLSGTEPKFKVYIDLYDFSKDQKRDFYQELKIKAEDILDFLKNYLGL

SEQ ID NO: 76892 - protein, 53 aa, Ureaplasma urealyticum
MAIKRGVRLQCNESKSINYITTKNAKNNPDRLSLNKFCPKCRKVTTHVEIKKK

SEQ ID NO: 76893 - protein, 580 aa, Ureaplasma urealyticum
MYKFDQKLNHSAAHLLAMALTKFYPNLSLAIGPTIDEGFYYDFNLNDPNTSITPLDLLKIEKEMKKITTQALTFDYEQVTYEKAKELFKHNKYKLDIIEQNKNNSLSIYHSGKWFDLCKGPHVQNTKEIKAIKLLNIAGSYWRGDANNDQLIRIYGVAFSDQDQLDAYLKDLQERKERDHRKIGKDLNLFTFNNLAGQGLPIWLPNGTIIKNQVQKFINEVEFQFNFDTVITPILGSIDLYKTSGHWDHYKDNIFSPVQIDNEILVLRPMTCPHHTLVYSNELRSYRSLPIRLSEHSILHRYESSGGLTGFERVREMILEDCHVFCRFDQIEHEVINAFKMIQEAQEGLGIKTFEIHLSLNDPNDKEKYYDDPQMWEQSQNVLRKMLKDHNIPYKEMVGEAAFYGPKIDFQVKTVLNRIITVSTIQLDFLLPNRFNLTYINESNEQSVPVMIHIGIIGTYERLLAILLEQTKGILPLWLSPIQVVIIPVNENLHTDYVKELNIKLRKHLIRSNVDLRNERLSKKIREAQIQKIPYQIVIGDEEIKNNKMVTYRCYGSEKTTTVSITDFINMLENKIRLKK

SEQ ID NO: 76894 - protein, 438 aa, Ureaplasma urealyticum
MSANAYVFRRSPIHRLNPAIKFISFILLIAMIFLPLGFFAQMIIGIFILIVFFVAKLPKRTLWNVFKSVVMLFIILLLINWMTYKDPIAIYNVTDQAKVILGNNSWINGPINRNLSFNLFYNDISSTHPQNLVSNIWGGEIKNYISPEIIKKLIDKPDYNVAKFLNENNVTVKKLESTFNALNQDVRLNNFYPIYGNSTLKSGKLEVPLSHLSYYMSTNLWKINGIKYQGLILSGVGDQLGKAQTALFYTRSPFALSPIAIQLAVYISIKIFLMITLSSILTATTSSIELTNGLEDLLSPFKILRLPVAEASMMISIALRFIPSLLDESKRILNAQASRGVDFNNGGPIQKLKSLISLVVPLFSIAFKKAEDLANAMEARSYNPRYARTRYRTFPLNLADYALFGILCILVGFLISLAVIKFYFTPFGVFEASALFAK

SEQ ID NO: 76895 - protein, 433 aa, Ureaplasma urealyticum
MQKLMDYFFKRKLKVPRPISNDISVRVKNLYAVYDEKQENQLVALNNISYDFKKNKIYFIIGNSGSGKSTLVTHFNGLMISRYGFVQVGDIVSGDHFDFERQLLGVIDSYDKKIINLLWRNQLDQWTFLVLFSNEVNIQQARILFEANFKQKPISLKFIKTKNNHELITNPYVRENTKIAVVRVDKNVILEINDKMNYEELQRFEFIKKEIKTNYHLSKKIKRFKELRRRVGFVFQFPEYQLFKDTIEKDIMFGPVNLGVKKSEAKKRAKFYLNKLGLGDDYLERSPFGLSGGQKRRVAIAGILAIQNDILVFDEPTAGLDPAGEHEMMQIILDAKANNKTVFVITHTMEHVLEVADEVIVMDEGEIIKTGTPYEIFFDQHIINSTSIQVPRVIAVINELIKKDLKYEILKQKQPRTIEELADAIIEFKKGEK

SEQ ID NO: 76896 - protein, 294 aa, Ureaplasma urealyticum
MSHNDKNTHNYQISSLDKIINDSSVAIEFENVYFAYTEERMILKNVSFTINDNEYVCVIGHNGSGKSTISKVLTGLLKPKSGVIKLFGIEISAANLKYLRNNIGIVFQNPDNQFVGITAEDDIAFGLENRKVPPNKMWDIINDAAVATGIEDLLKKESLELSGGQKQRVAIASVLAINPKVIIFDESTSMLDPKGKNELKELMVSLRDVAKKTIISITHDMEEVVKADKVIVMSNGEVQYIGTPQEIFANEERLLKMQLDIPFTLKLAKTLKEKGLKIDLTLNNEELIEKICKN

SEQ ID NO: 76897 - protein, 229 aa, Ureaplasma urealyticum
MAKISKKLFAAYEGIDKQKAYPLFDAIKLAQEKSITKFDGSINIAIKLNLDTTKVEQQLRGSISLPNGNGKNVRVLVLSEDITKEEAASVGADYFGGADYIQNIEKMLNQIDVIITNQKMMPLLAKLGKVLGPRGLMPNPKIGTVTNDVLKAVEEFKRGRIEYRTDTYGNIHMSIGRVSFETTKIEENANALLNLIKSKKPATVKGQYIQNIAVSPTMGPGIKVVINNN

SEQ ID NO: 76898 - protein, 150 aa, Ureaplasma urealyticum
MAPKKKEVTRIAKLNLIGGQAKPGPALASVGINMAEFTKSFNDKTKDQNGKVIPVIITAYKDKSFDYVIKTTPVTFLLKDIAKIKSGAKDPKKQTVATISKEQALEIARYKLIDMTAYDEEAALRMIAGSAKQMGIVIEGVSAYKEKKGN

SEQ ID NO: 76899 - protein, 477 aa, Ureaplasma urealyticum
MQNFEVIIGIEVHTALNTKTKMFSNAATSHKSIPNTLINEIDLALPGTLPTVNQEVVHKGLFLANALHMRTNHQFIAFDRKHYYYLDLPKGYQITQNYFPIGQNGYIQIIDEYNNLKRIRIKQIHLEEDTAKQTNIGNQIYLDYNRAGWPLIEIVSEADLRSAQETVLFLEELRKILLFNDISDAKMEDGSLRVDVNVSIRPQGAKKFGTKVEIKNINSISNVAKAIDYEIRRQLNLILLNQNVEQQTRRFDDNTNTTVFMRSKNDAINYRYIREANIAPIHLSDDYVKKMFLTKSCSINDLRQQLAQKGLVSSAIEQLLSDGPLFKAFKYVDKIVNNPLSVYKWLCLEFIGLINKNTQNIEEITPELLQKIARMILLFDQTLINGKQTKIILEKIYLTNKDPQILIKELGFEQITNENEITKLWHQILAKNQEMLLQYNERPDRVEKFFMGEIMKLTKAQANPTISFNVLKKILQK

SEQ ID NO: 76900 - protein, 477 aa, Ureaplasma urealyticum
MKNKTILALHNQIKKREVKIYDLIKKSIDHDLKIKNLNATLANNYEQALKQAAFLDEKISSDNLEIDYLFGIPYSLKDNISTKNIITTGGSLFLKNYNPPYDATVKTLLDQKQAILLNKSNLDEFGLGGTGTDSAFGPVINPLNPKHVSGGSSSGSAVLVQQGVVPFAIATDTGDSVRRPASIMGIVGFKPSYGLISRYGVYPFAPSLDHVGIFTNNIFDTQIVFNALAKRDFKDFTSLSFKTQSLSMLKTKNKYKIGVLKPSFDLLASKYQQELTNLIVKLNDEHEIINVDYDINLLKAISPVYKLIAFSEAYSSYSNFTNITFGKHDIDYDNYEDLIIKTRTLYLGTQLKQRFMIGAYVTQESQFETLLVAAKKMRTLIVDQAKNLFKNCDLILNLAVHDISETIDDVNNQKPTTNLVEDVMQIANFGGFPSIVIPFLTTKLGNLGLNLWADYLNDNKLLNGAYLINNLLGNEEK

SEQ ID NO: 76901 - protein, 486 aa, Ureaplasma urealyticum
MPTKDLNDAILDLFCLIINNNDFWKDVVLRLEVKDFPEKIQQNIFNTIANLNEQKYKINESNILNALANYVIIDEQDQNYLLHKNYLLQILDRTDYLVDLKDCIEIIKNASIKNKLDVFANEILATQISLINAKDQFKEMHEKFLEILASRTEDTIENMELIANRYFEKLNKIGNSGIIPGVIKTKYDNIDKFTNGYKPGELVVIAARPGIGKTTFCLNVMVNNVNEIIEYNENIQPNQKEKIIVMFSLEITKEQILQKFISIKTGISNREVIENKYRITKGYDTRSFAMQAINDIKSWPIFIDDRPNISIVDIEAKLYDLKKRYDIALVVLDYLQLVSGGNANKNMTRTQEVGRVSSALKIIAKEINAPVIAIAQLSRKAEERDVSNNVNMKNNPLVKTIDNSPKLSDLRESGSIEQDADVVAFLHWDRKQRNFMQNDNQETRMRDDLIEAKFIVEKNRNGSTGETDIIFSKLNSKFIRATTSKE

SEQ ID NO: 76902 - protein, 145 aa, Ureaplasma urealyticum
MKVILLEDIASLGKKNEIIDVSDGYAKNFLIRQKKAVALTNKSQEVLNKDLAILEAQEQQAILDATLLKDKLEQKPLQFFLKTNNLQTFGSISNKQIIDEINKEQKFITKHMITKPHALGIGEHIVEILLHKKVTAKLHVIVSKE

SEQ ID NO: 76903 - protein, 79 aa, Ureaplasma urealyticum
MAKVTNNRNRKPRKKVCILSAKGIEHVDYKDVELLQRFINNNNKIASRRVTGASARMQRRIANAIKRARFVGLLPYVKE

SEQ ID NO: 76904 - protein, 166 aa, Ureaplasma urealyticum
MNKVILIGNLVRDPEARQIPSGRLVTNFTIAVNDNTPNANANFIRCVAWNNQANFLTTYLKKGDAIAIEGRIVSRSYVDNNGKTNYVTEVYADQVQSLSRRNQSPSDNNKVNVDTMMESYTGINTDAAFSSNKPQTTLSSTTSNLNKNNDEEDEITSWINLDDDLE

SEQ ID NO: 76905 - protein, 160 aa, Ureaplasma urealyticum
MAKYEIMLVVRGDLDQEQANKVANELKATLKNTEVKENNYDGVQQLAYEINKLKTAYRYVYNFETTDVSLINEFRRLAIINKNVLRHIIINLEKDYGYKATVNTKKVQRNEKRAEVYARQKEEAERRAVERQAAYEAMKAEREAAGLPVKEFVKNTNSKR

SEQ ID NO: 76906 - protein, 506 aa, Ureaplasma urealyticum
MKQKNNRYTYINYLRSQRAFIQTLKPQILKLTSNNVCLNEQEVDLEPQLNNLEDINIQLTNEKVNIQDIVTLEEEINVKDNNQNQNLNEEILATTLINEQASGINEISEQKETTIANKKHKKQTMAFKAANSRKNFDFEKFEKNVKYKSFKDGTVKKIAAEIENVRLTFTNPSKPNDRALVLRNTSVQFYEGEVHAIIGESGSGKSVITSLLYGLAGKNANVEEGKILLYNNEVQDFSFKDWEKSRYLGKVISAVFQNPMSTLNPTMKIGKQIMEGMLINGIVKTRKEAYNKSIEYLKLTKINNPEEIMELYPHELSGGMIQRVVIASIVSLHPKILVLDEPTTALDPTVQALVLDVIRELQEKFKMCIIFITHDLGVVASIANYISIMYAGQIIEEGQRDEILWYPQHPYTWGLIMSMPDVNKGDRLATIKGSVPSRLNDIVGDAFAIRNDYALTRDFEHEPEMYHVSETHRVKSALLDERAEKYTPPQIILDKWNNFKKRQENN

SEQ ID NO: 76907 - protein, 123 aa, Ureaplasma urealyticum
MALFKINKGEIMNFVNSTQLKTDIPNFDSGDTIIVHNRIVEGKKSRIQKFEGVVLRRRGSGSSETVIVRKESSGIGVEQSFNIHSPLVEKIEVIKYGKVRRAYISYMRNRSGKSARIKELNKQ

SEQ ID NO: 76908 - protein, 228 aa, Ureaplasma urealyticum
MKISILSLFPELYETWIKHSIISNAIKNNQVIIEVIDFRLYTNDKHKKVDDYQYGGGAGMVLRIEPIVAAIRAIRSSNSYVILTTPKGQVFNQELANNFVSKYDHIIIIAGHYEGFDERINYYIDAQYSIGDFVLTGGELPSMVISDAVIRLLDGVISPSSLETESFNNYLLDYPVYTRPLVFEGHKVPDILLSGHHKNIADFRKQQQETITKKNRPDLYQKYLNNKK

SEQ ID NO: 76909 - protein, 101 aa, Ureaplasma urealyticum
MKILVKIRLTRVGTHKKPFFRIVVMDAKTKANGAYIENLGHYDPVLGQVVLKKEAILAQLQNGAQPSETVKNILSQEGIWKEFIALKDANKKRKAALSKAK

SEQ ID NO: 76910 - protein, 277 aa, Ureaplasma urealyticum
MQYKMLVIDLDGTLLTKTKNISKANLQGLKKYISLGGKVVLSTGRSLENTLKIVHLIHDQIKELIQYISCFNGSYIYDVINEKVLFESTINKDIVNEIYKFSLKHGLGFWPYNQRFMQTHFLDVYNINYKFLLQLHHTKRKVCLNPIFNKNDKFYKINILPSNFVKKLKHEVIDQLIKEFSDQVNISFTSKYIVEVTNKNINKASSLRFIANLYQINLDKVATIGDSPNDIPMFKISGLAAAARTKSKTIIEHVDVIINYKNNSNSVALFINNYLLK

SEQ ID NO: 76911 - protein, 596 aa, Ureaplasma urealyticum
MENTKKSPTYVYALGGLEEIGKNTYVVEHEDEIILIDAGIKFANASLPGFDGTVANFDYLIKNNHKIHSLVVTHGHEDHIGGIPHILRHVKIKTIYAPTLAAKLIERRLSEYKDIKPPRIIVFEDESMYKTKYFEVDFYRVCHSIPDSFGICVKTPNGYIVTTGDFRFDFATAGDETNLAKISQISNRGISVLMCESTSAEIPGFSESERYVIDNIRDYMVNIKGRTFISTFASNLGRVEEIIAIAVGLNKKICIIGKSMEANIKTSRKLGYLNVPESSFITHKELPFYKDHEIVVILTGSQGEKMAALNVMANNNHSKITLKPSDTIILSSNPIPGNYAQVEAMVNKLYKLGLTVYENSPNKKIHASGHATRSEHQLMIKAINPSYLFPIHGEYKMFRALKQNAVDQGFDKDHVIIAPNGQKLQLLDGVLSHTNIYVDAEPKFINGYEISSKISKLLSERVVLSSDGILNLVLNADFKKAKLNSAVSISTRGCFFAKESTNLINKISNVAKSSLEEALAKKEFDEKKLKEIVSGNVKSIVWKWRKKNPIINVTIINNDLVEQFRKDNNYVEFIKQAEVEEIEQEVDIDDLISNGL

SEQ ID NO: 76912 - protein, 578 aa, Ureaplasma urealyticum
MRNNLSDLEIEKLTKTLVSKNKRVVALYGVPENTSYKLMNDLISLMDVEIPNWSSISSATEDQCINDIKNFLLSNASLENFKNLPSNNPLINWWKRRRLNTVVKKIEEINSAFADREITSRSKIFLMPVLTAFSTLGTTLAVPLISVTFLRGDAIINLWGKDGYIAFLSLLFSLVVAVIISAFVALFSSLKNNKRNYIVSNMTKGLKRIYDKYFIESNSQEKINAKVTFYSRFLERSKFVVQNNYTFFYDVVDINSDQYPKILKYFKTLNQLNNTVIFDASGFKYLDERKIFRNIIDLEKTNVVRLDRYKTKTSGRRLMSFIFYQLSIIANVNTRKLLQKFPFFVNSLYRFLDYSEKNTELLTLLLDIKKHASKTEIPLNDESQLFFVDFFTFVVFKALDELGFETLMNDLTVYGRPSEITKKNITYNSLKLDYIINRNARNFGQQALLFNLLDYFDETVNKNIFNELGNSNKNMIFSKNHQLNLANEALSKKGFTKREIDLNNHWYDALYSNLHDDEDMFVKIIEIKDNVDILNVLDELFVRAQNDGVKNLLIYVFNVKMLYSLIDNEYELVNESII

SEQ ID NO: 76913 - protein, 428 aa, Ureaplasma urealyticum
MTNDERKEFIRKNKIIYFNRIRYFFYEWTDMKAYQRMLVPETFFSFFYQLFVLMIAFCSVTIIIYNQIELKQANEEHIDFIAKYFEVYYAFNIFFIIDYLIRISYADYTYNSISRLKAFLIAPFRFVNLLDLVSFVAIVIIYNTGLLDFVAKMNETTSYSQKFDYYYQIINNNAYMNVVPCMFLIKILGAHSKIIKNVILSSEVNFFWQIFKRRWRVLLSSFLILVLFTFLLSFIIYRIEQNYYEIKHILPGNPLYKLKNFGETLWFSMGTITTIAYGDVTPVSPAGKVFAVILGVIGVTYYGFLTSLFASALISVINEFGKRRDSRRLLEFQNENERLLHEFSEQIKVDIVQELIKNNVIQDPEEIKRIEDLQNQEREALKMKAKRRKKIYFSDDLFDDTKRISVSNVKVRSASNVTKVLGRSSTKK

SEQ ID NO: 76914 - protein, 133 aa, Ureaplasma urealyticum
MQKSNIVEYKGLGRRKSSIARVKLVPGSGKVLVNDRQPENYFPNKLVIQDMMQPLVLTKTAETYDVYVKVIGGGFNGQAGAIRLGITRALIQTREDLKTDLRKAGLVTRDSRVKERKKFGLYGARRAPQFTKR

SEQ ID NO: 76915 - protein, 148 aa, Ureaplasma urealyticum
MQKSSMLKKEVAIARRQWYLVDATDLVLGRLSVKVADILRGKNKVDYTPNVDAGDYVVVINSDKVVLTGQKALRENWYNHSHYIGGLRTRSGEEMISKYSDELIRRSVKGMLPKNKLAKQILNKLFIYKNDKHPHEAQQPTILELKLK

SEQ ID NO: 76916 - protein, 526 aa, Ureaplasma urealyticum
MKRKNKIITSSLALLFTGVIATISIAACSKQNNQKTKNFNSQEQANKIIEAILNKKEGKDNFIDWVHWWNSPFQQARKLAKDLDKYIDLTKSKNFKSMIDKNEYKSTFSAQIENVIRIIKDDIKMYANSPFWKKWRQQKKTALFLINYAPIQKDDSQINAPGILLPAEYPLLYSKPDFEELPGFGAFFPTPKSMDAVDLLDTWKSFGSLISSKGNSVEKSVLASKLQNSFAKTADKVVYIYDDAIVPNIYDKNGNRNLKITQEFANWMINQNYKGYLAREFLKINQKNDLIPLPMSIVWHASYGIIGMHRMLYTLSKAFGMPKDELEHLKAQEKFKIPTLKKLLTNDELELKNGIQTIKTGIDSPFKYHRDQNRDDWKIWATNSQVLDICIALGLKPDLLVKGELSTSVHEDPNLAYYLNDVIKNQLSDIEQISIKKNHINWTATNYEPIKNLNVNLILMGVHGLIKNSAFKKMMDEGKQIKNWAFTDRRFSDETRQYVKKGEEDLYSQNASILGWDEFLKTKNNQ

SEQ ID NO: 76917 - protein, 537 aa, Ureaplasma urealyticum
MKISVKKTKQIGLFTSIAIMISSVVGIGIFFKNGSIFRFNNFNEIGIIISWVVASLIAFFTALSFAYITFSKKSGSGIAGIIDELKAPKCARFISVLQTFFYNGILMPSISFFAAESLLMTIIPKNSSSPQIYQIFILAIGLFLFFLLLNFISFKFSSILQNIATIIKFIPIIAIAIIGITYGINNAQNSLFNHNNPKHANFSLLGILASLPSILFSFDSFLGISSLQHKIKNAQKNVPITLIVGMFLVAIVYILITIGQVFVGEGYAYGVINKVFKNNINLLKIITIIVNVFITISIIGVLNSFVIFSIHNAQYVINEKIIFWWSWIQRVQSKHFKEAQGLISVLFIFFTWITIFMIISIPLNTDAYIDLLSNYPIVFFFAVYGLIIAFAFYKKVKTKQKIKGIKKQYYTSDVTKRPKWFFNYQNSSLKNKNILNKELKIANNWILSVWIIGITSCLFVFLYQFLYGYTIYAWLDPYNLKLYTFGLFYANNVSVIPWIVSLLFFVMLIFFIGFPFLNDAILNLNHKKVNKQQKVFV

SEQ ID NO: 76918 - protein, 166 aa, Ureaplasma urealyticum
MVNDKKQKSNKYLTYQDQEYERNLLLEKERKQQKKILAQQAYQQLDLNKKLIKKAKNDQKLILRLLKEDKSISKTQFNTHRLELKNTIDQMVDEYYELLEQYSVDFEKISFKLKRWLYGINKEIRRTTWASKRSVIISLIIVIVIVLILAAIFFGIDTGFYKLSAK

SEQ ID NO: 76919 - protein, 258 aa, Ureaplasma urealyticum
MAYKIKDLDSKLLSDLKIDFNHRHQWYIVTVVSGNEQKVIENIKDKLNGYGYGDKLSDLKIIKEKIKEVKIYEPSEAPRSMKNRANTKWETIVVDGATKYRCTKIKEGNKFNGYIFLKAEMTDQIWFLIRNTQMVTGLVGSSGKNVKPIPVPEDKILKLIADNDAKRALISLNEKVDHEENIEVIELHEDENFTNFEVDQEVKIIADTFFGEIAKIAKIDQNKKIATVEFEFFGRINTLDLNFNDIQLYDEESDKLEN

SEQ ID NO: 76920 - protein, 443 aa, Ureaplasma urealyticum
MKFNSNYQKWILDSLINQKIFEPTPIQLKTMPLIAKRENIIGVAPTGTGKTLAFVLPILNNLDLSQKLQVIIITPTRELARQIFSKIIVFKKHQPLLQVKMLIGGESIDQQINSQLNKSQLLIATPTRLKQILTRQILDLHHVNALVFDEADMLMDLGFISDLEFINSQFTNKDVQKISFSATLHEMLSIQLKKYFKNTKIINISNSIYENKKITHYVIHNHDKWHSLSIIMKTIKPYLCIIFANTKKEVEAIYQYLIQQNKNVCILHGSLLQRERKNNYRDIKNNKFQYVVASDIASRGLDIDGVSHIINWNLPTENEWYIHRAGRSGRGKYSGESYVLYDQKEHDKLLNLSKKGIVFHHKFIKENELFDKEFLFKKKNQFKDLKTQNEIQKIISTTSTKIKPGYKKKIKEAIQKINQKNKRSHIEKKMNAHRIRGYKLKNS

SEQ ID NO: 76921 - protein, 215 aa, Ureaplasma urealyticum
MNKYNIYVDHTLLKADASLEEIHKLCEEAEENEFYSVCINPCFVKVAKHYLLETSVKICTVIGFPLGANTIETKVFETKNAIDLGADEIDMVININQLINGNREYCLNEINQIKEVCGDKILKVIVETAFLNREQKEFAAKIILESNADFIKTSTGFAKEGAKLEDIILWKRILGDVKQIKASGGIKNFEDFKSFIEAGATRIGTSSAIKILNNH

SEQ ID NO: 76922 - protein, 653 aa, Ureaplasma urealyticum
MNRYVNAMRSLALQAINKAKQGHSGMSISAAPIVYTLYKGLMTISKSHPKWFNRDRLVLSAGHGSMALYPVFYFSSLLTLDDIKNFRNDNYLTPGHPEVLANNYIDASTGPLGQGVANAVGMAITESYLRTEFATLKGVIDHYTYCIVGDGDLQEGICYEAMSIAGKLKLSKLIILHDSNDYQLDSAVSDVNIEDLKMRVESMGWNYLKTDNNPENIFKAIAEAKWKKNVKPTFIEVKTIIGEGTSFENSNEAHAAAISNDELEKFSKRFHIKTNNFEFHQEIFDHFFFNVVARGESAYNQWQQLVDQYMQTNPEQMQRLLNYINGNYEDLNKLLDENKITNLNDSTRSYLKQYFNQLKDLKSALVLSADLAKSTFTKIGEGAFNDNHKNPYIKFGIREFAMAGAMNGISLHQGVKAIGGTFLAFSDYMKPAIRLAAISNLANLFIFSHDSYAVGGDGPTHQPVDQLPMLRAIPNVEVIRPADHYEVKYALSYSFKQKQKPICLITSRQTIKQINDQKPQDFSKGAYIINSPFSFCKDVDYTIIASGSEVSLANDAAKELFEKHKLKIKVISAFNLNLFLRQKPEDIKSLLASKNGLLAIEASSEMLWWKLSIYTNKFIQIAANQFGRSADGDKLMNEFGFSVKNIINQLLNQ

SEQ ID NO: 76923 - protein, 87 aa, Ureaplasma urealyticum
MISKEFTIVAELSAFIKAITYFVNAASDFSSSITIKANGRQADAKSIINIMALGIKQGTKIELSAVGNDANKAINKLEEILIEQKLI

SEQ ID NO: 76924 - protein, 677 aa, Ureaplasma urealyticum
MQKDLIVVESPNKIKSIQSYLGDSYNVIATCGHLRELAKKSGYDPKTYDLKWEIIKTTNKKLSKKQQIKTIIDLAKKSNNIYLATDPDREGEAISWHVYDLLPKKDKERVKRITFNEITQKAILKSIDEKHDIDFNLVDSQFARRILDRVIGYKLSGLVKKNLHGLSAGRVQSIALLFVVERELERRSFVKEEWYQIEGIIEKNIFVSLRKIPYDVELYNQKDNSDSDLKFLHKKDAQRVIDDLSDIFKVYSIDDLKITKGDVQLPLTTDKLLQIASNNFGWSANKTTLIAQQMFEGLEINNQQLALITYPRTDSERLSDDFLQEANAFIENNFGKEYLENFKNKKINRKEVNIQDAHEAIRPVDINLKPEEIKDYVSLDIYKLYNLVWNKTLSALMKVPTFNKQVIRFINNEYKFYTAYKTIRTLGYWILDFYKKQRDELEFQPPIINVGDEFKKEKIDLIQKETTPPPYYTEASLIAALKNAGVGRPSTYATMATIGTTRGYINKDKSKLIPTELGIKVIQELKEAFPKVISIKFTSEMEERLDVIANGKLFWKDLVSTFIPIFEEEVKQAYTKIEKVPDEKINRLCPICAHDLLIKRSRMNTRFIACSNFPTCRFTESLEKPEILNELCPNCSKSLVKRKNRKNKYFIGCTGYPECNFIRNLDESNNDKNDFNQ

SEQ ID NO: 76925 - protein, 273 aa, Ureaplasma urealyticum
MDIINKKINWFPGHMKKATDEILKNLKNVDFFIQLVDARCPLTSSNIELLKEVSSKPVINLANKADLSDWKKNFDNNFLLISTKKRNDKNKIIQHLYQLFDQKIKIYQKKGLINPKFVGMIIGLPNIGKSSLINFLAPKKVLKVENRPGVTKTQCIRQINQHFYLIDTPGIFLKNIQNERDSFVLTLINCVKKEVLELESIVHFAYDFYLKNYRNELFIKYKMNKVLNFDDFIHHICELYNYKLTNNEFDHVRAYENLFNDFSNGLICKVNYD

SEQ ID NO: 76926 - protein, 223 aa, Ureaplasma urealyticum
MAKVNAFSKKIGWIELITGPMFAGKTAELIRRLHRLEYADVKYLVFKPKIDTRSIRNIQSRTGTSLPSVEVESAPEILNYIMSNSFNDETKVIGIDEVQFFDDRICEVANILAENGFVVIISGLDKNFKGEPFGPIAKLFTYADKITKLTAICNECGAEATHSLRKIDGKHADYNDDIVKIGCQEFYSAVCRHHHKVPNRPYLNSNSEEFIKFFKNKKRNKNI

SEQ ID NO: 76927 - protein, 368 aa, Ureaplasma urealyticum
MSLSAGLVGLPNVGKSTLFNTITNSRVEAANYPFATIEPNIGIVNINDPRLKRLASLVVPDKIVPTTFKFVDIAGLVKGASQGEGLGNQFLNNIRDVDAICHVVRCFDDKSITHVHNKIDALSDIHVINYELILSDLDIIEKRISRIKKKADSGDKDARREYLILFNIEEALKKGQLASSVKLTKEELKIINSFNLITLKPILYIANISENEISNPDLNKEYLKVKKYAQDNDARCVALSAKIEYEISILDEESKSIFIQDLGIKTTGLDEIVKQTYDLLNLKTYFTYGKQEVRAWTFINGMSAPECAGIIHSDFEKGFIKAEIMHYDDLISLGSEQAVKEAGKIRMEGKSYLMKDGDICNFRFNVTK

SEQ ID NO: 76928 - protein, 290 aa, Ureaplasma urealyticum
MSPLVNAKKMIQNAYENHYAVAAININNLEWIKAALLAAQETNSPLLLATSEGAVKYMGGYDNCYAMVVNLIKQMNIKTPVCLHLDHGTYEGCIKAINAGYSSIMYDGSKLSIEENIKNTKELLTITKLKGVSVEVEVGSIGGTEDGITSEGELANIDDCYQMCLLDIDMLACGIGNIHGIYPKNWKGLNFNLLKEINNKVNKPIVLHGGSGISDEQILKAINLGVAKININTECQIAFSNALQDHLTKAGDLILSKQYDPRKILAYGVDAIKNTIIDKFTKFNSLNKIK

SEQ ID NO: 76929 - protein, 482 aa, Ureaplasma urealyticum
MKIRTRYAPSPTGYLHIGGARTALFNYLLAKAYGGDFIIRIEDTDIERNVEGGINSQLDFLAWMGIIPDESIRNPKAFGPYIQSEKLKHYEKLALDLVDQKKAYFCFCSKEQLDADRELAEKSHQTPKYKRHCLNLDKKTIESNLLQNKEYTIRLKINENMEYSWDDLIRGKISIPGSALTDPVILKSNKIAMYNFAVVIDDYEMQISHVIRGEEHISNTPYQLAIAQALNYDITKIKYGHLSIIVDETGKKLSKRNLSLKQFVSDYEKDGYWPHAITNFVALLGWSPKNNDEIMSLETMIKNFDINNLSKSPAFFDINKMNWFSTQYFNNITQEEFINFIKKHSLTKELVLNDYTFINKCLLFKSHIINLKQLIDLVIEQFNCDKKVLASDVDYIKKNQLITVVRVFYEQLIINDEFNEEFIKEIIKKVQIITNNKGANLYMPIRIATTFSSHGPELAKTICYLGREKVLKNLINILKILD

SEQ ID NO: 76930 - protein, 257 aa, Ureaplasma urealyticum
MGQNFLLSNNIKNKIVDVANINKDDLILEIGPGWGAITEILVQKTNILIAIELDKRLYAHLKTYIKTSNFHIINNDVLCVDLDNLILDYNNTQKIQKIKVVANLPYAISSKIVLKIIQSKLINDAYIMVQKEMAERIGAKVNTRGYNAFTVLVQLFCKTKILFEVNAKEFHPQPKVQSAVIHLENLHNSVNFNIEELGKFLRICFLNKRKKLKNNLSNIYDIKIINQMFIDYNLDMNLRAENIEPKMFLKLFNYLNR

SEQ ID NO: 76931 - protein, 383 aa, Ureaplasma urealyticum
MSSVDKQNLTNRMRISVSHFAGASNANSIKKERKKKIFNVLLKVFKIIVYAFFLGIGLYGCFQNMANHWTINSTIVGNGFELGFHVDPILGANDIRFDLIYSGTGPWYPMSDFSFDYGPFYALFVWPIAQILLHFMYATRDWPAGLNAILGLIIILLIIRVITMLISARATIQTERISEIQGKIAEINAKYKDAKDMQSRQKKQMETKELYQKHNVKPLAPFESMIITLPIFLIIYRVVTILRPLKFISIFYIWDLSATPISEIFSNFTTSGWPYIFFLLIIIPVQILSQKIPQLLARKRNRNATTVGAKNKQQLKRVRMTQNIIAIVLAVVVAISASGIGLYWFFNAIFTILQSYIIHVIIMKRRSNSATRIESKLAKLGIS

SEQ ID NO: 76932 - protein, 113 aa, Ureaplasma urealyticum
MANFISLKKNEDILDTIKKQQKIHSNQIVVYFRKTNLKNVRLAISISKKKFKLATQRNRIRRLIKAWFIAADIPIKSYDIVVLVKPSFIDGSFVLNCNNLKIILQRIINKEKR

SEQ ID NO: 76933 - protein, 48 aa, Ureaplasma urealyticum
MKRTFQPNNRKRAKVHGFRARMKTKNGRNVLARRRLKGRHSLTVSSEK

SEQ ID NO: 76934 - protein, 464 aa, Vibrio cholerae
MALIQSCSGNTMTTDTIVAQATAPGRGGVGIIRVSGPLAAHVAQTVTGRTLRPRYAEYLPFTDEDGQQLDQGIALFFPNPHSFTGEDVLELQGHGGPVVMDMLIRRILQIKGVRPARPGEFSERAFLNDKMDLTQAEAIADLIDASSEQAAKSALQSLQGEFSKRIHTLVESLIHLRIYVEAAIDFPEEEIDFLADGKVSADLQTIIDNLAAVRREANQGAIMREGMKVVIAGRPNAGKSSLLNALSGKESAIVTDIAGTTRDVLREHIHIDGMPLHIIDTAGLRDASDAVEKIGIERAWEEIRQADRVLFMVDGTTTEATDPQDIWPDFVDKLPENIGITVIRNKADQTGEPLGICHVNQPTLIRLSAKTGQGVDALRQHLKECMGFSGNQEGGFMARRRHLDALERAAEHLAIGQQQLEGYMAGEILAEELRIAQQHLNEITGEFSSDDLLGRIFSSFCIGK

SEQ ID NO: 76935 - protein, 541 aa, Vibrio cholerae
MDSQRNILLIALALVSFLLFQQWQVAKNPAPQATQQAQSTGAAPAPSFSDELDPTPAQNVAAKAKTITVSTDVLTLSIDTLGGDVVSAKLNQYSEELNSPESFVLLQNTQGHQFIAQSGLVGPQGIDVTSNNRPAYQVSADSFTLAEGQDELRIPMTYQANGIDYTKTFILKRGSYAVDVVFDVANNSGSEATLGMYAHLRQNLLDSGGNLAMPTYRGGAYSTSDVRYKKYSFDDMKDRNLSAPNDVTVNWVAMIQHYFASAWIPRDEPQAQLYSRVINNLGDMGIRTPNKTIANGDKAEFEATLWVGPKLQDQMAATAPNLDLVVDYGWLWFIAKPLHWLLSVIQTFVGNWGVAIICLTFIVRGAMYPLTKAQYTSMAKMRMLQPKLQAMRERIGDDRQRMSQEMMELYKKEKVNPLGGCLPILLQMPIFIALYWALMESVELRHSPFFGWIHDLSAQDPYYILPLLMGASMFVIQKMSPTTITDPMQQKIMTFMPVMFTFFFLWFPSGLVLYWLVSNIVTLIQQTLIYKALEKKGLHSK

SEQ ID NO: 76936 - protein, 118 aa, Vibrio cholerae
MSTYAFNRELRLLTPEHYQKVFQQAHSAGSPHLTIIARANNLSHPRLGLAVPKKQIKTAVGRNRFKRICRESFRLHQNQLANKDFVVIAKKSAQDLSNEELFNLLGKLWQRLSRPSRG

SEQ ID NO: 76937 - protein, 45 aa, Vibrio cholerae
MSKRTFQPSVLKRKRTHGFRARMATANGRKVLNARRAKGRKRLSK

SEQ ID NO: 76938 - protein, 472 aa, Vibrio cholerae
MSEGIVSSSLWLQCLQRLQEELPAAEFSMWVRPLQAELNDNTLTLFAPNRFVLDWVRDKYLNNINRLLMEFSGNDVPNLRFEVGSRPVVAPKPAPVRTAADVAAESSAPAQLAQRKPIHKTWDDDSAAADITHRSNVNPKHKFNNFVEGKSNQLGLAAARQVSDNPGAAYNPLFLYGGTGLGKTHLLHAVGNAIVDNNPNAKVVYMHSERFVQDMVKALQNNAIEEFKRYYRSVDALLIDDIQFFANKERSQEEFFHTFNALLEGNQQIILTSDRYPKEISGVEDRLKSRFGWGLTVAIEPPELETRVAILMKKAEDHQIHLPDEVAFFIAKRLRSNVRELEGALNRVIANANFTGRPITIDFVREALRDLLALQEKLVTIDNIQKTVAEYYKIKVADLLSKRRSRSVARPRQLAMALAKELTNHSLPEIGDAFGGRDHTTVLHACRKIEQLREESHDIKEDYSNLIRTLSS

SEQ ID NO: 76939 - protein, 366 aa, Vibrio cholerae
MKFTIERSHLIKPLQQVSGTLGGRASLPILGNLLLKVEENQLSMTATDLEVELISRVTLEGEFEAGSITVPARKFLDICRGLPDSAVITVLLEGDRIQVRSGRSRFSLATLPASDFPNIEDWQSEVQVSLTQAELRGLIEKTQFSMANQDVRYYLNGMLFEIDGTTLRSVATDGHRMAVAQAQLGADFAQKQIIVPRKGVLELVKLLDAPEQPVVLQIGHSNLRAEVNHFVFTSKLVDGRFPDYRRVLPQHTSKTLQTGCEELRQAFSRAAILSNEKFRGVRVNLADNGMRITANNPEQEEAEELLDVSFEGEPIEIGFNVSYILDVLNTLRCDNVRVSMSDANASALVENVDDDSAMYVVMPIRL

SEQ ID NO: 76940 - protein, 805 aa, Vibrio cholerae
MSNNYDSSSIKVLKGLDAVRKRPGMYIGDTDDGTGLHHMVFEVVDNSIDEALAGYCKDIVVTIHEDNSVSVSDDGRGIPTEMHPEEKVSAAEVIMTVLHAGGKFDDNSYKVSGGLHGVGVSVVNALSEKVLLTIYRGGKIHSQTYHHGVPQAPLAVVGETERTGTTVRFWPSAQTFTNIEFHYDILAKRLRELSFLNSGVSIKLTDEREEDKKDHFMYEGGIQAFVTHLNRNKTPIHEKVFHFNQEREDGISVEVAMQWNDGFQENIYCFTNNIPQRDGGTHLAGFRGALTRTLNNYMDKEGFSKKAQAATSGDDAREGLTAVVSVKVPDPKFSSQTKDKLVSSEVKSAVESAMNEKLADFLAENPSEAKNVCSKIIDAARAREAARKAREMTRRKGALDLAGLPGKLADCQEKDPALSELYIVEGDSAGGSAKQGRNRKNQAILPLKGKILNVEKARFDKMLSSQEVATLITALGCGIGRDEYNPDKLRYHNIIIMTDADVDGSHIRTLLLTFFYRQMPELIERGYIYIAQPPLYKVKKGKQEQYIKDEEAMNQYQVALAMDGAELHVNADAPALAGEPLEKLVQQYNAAIKLVERMSRRYPYAMLHELIYVPRINAELCADKAAVEAWTQRLVEQLNAKEVGASQYSVLVEHNAELNVYLPKIQVRTHGVTHEYLLSADLINSKEYAKLADLSEALDGLIEAGAFIKRGERVQPISSFAAALDWLIKESRRGLSIQRYKGLGEMNPDQLWETTMDPETRRMMQVTIEDAVGADELFTTLMGDQVEPRRAFIETNALKVANLDV

SEQ ID NO: 76941 - protein, 418 aa, Vibrio cholerae
MQYSSFGEKFNRYSGITQLMDDLNDGLRTPGAIMLGGGNPAAIPAMLDYFHNTSAEMLADGSLLNAMTNYDGPQGKDVFVKSLATLLRETYGWNISEKNITLTNGSQSGFFYLFNLFAGKQPDGAHKKILLPLAPEYIGYGDAGIDDDIFVSYRPEIELLDQGLFKYHVDFSELKVDESVAAICVSRPTNPTGNVLTEEEIHKLDQLARDNGVPLIIDNAYGVPFPNIIFEDIEPFWNDNTILCMSLSKLGLPGLRCGIVIANEAVTQALTNMNGIISLAPGSMGPALVQRMIEKGDLLRLSEQVIKPFYRQKAQHAVELLQSAITDPRFRIHKPEGAIFLWLWFDELPITTMELYQRLKARGVLIVPGEYFFIGQPQEWPHAHECLRMNYVQNEQAMEQGIAIIAEEVQKAYQQANV

SEQ ID NO: 76942 - protein, 688 aa, Vibrio cholerae
MAKEFLIELGTEELPPKQLRTLAEAFAANFAAELATADIAHEGVTWFATPRRLALKVANLAESQPDRVVEKRGPAVNVAFDADGKPTKAAEGWARGNGITVEQAERLVTDKGEWLLFKEQVQGQQTASVVVEMAAKALANLPIAKPMRWGDKETQFIRPVKTLTILFGSELIQGEILGVASARTLRGHRFMGEAEFTIESAEQYPAILEERGKVIADYATRKAMIIEGSQQAAQQLGGIADLEDALVEEVTSLVEWPVVMTAKFEEKFLKVPAEALVYTMKGDQKYFPVYDASKKLLPNFIFVSNIESKEPRHIVEGNEKVVRPRLADAEFFFNTDRKRPLVDRLPLLENAIFQQQLGTIKDKTDRITELAGYIAEQIGADVEKSKRAGLLAKCDLMTSMVFEFTDTQGVMGMHYARHDGEAEEVAVALNEQYMPRFAGDELPSRGVSAAVAMADKLDTIVGIFGIGQAPKGSDPFALRRASLGVLRILVEYGYQLDLVDLIAKAKSLFGDRLTNANVEQEVIEFMLGRFPTWYQDAGFSIDIIQAVLARNPTKPADFDQRVKAVSHFRALEEAEALAAANKRVGNILAKYDGELGEEIDLALLQEDAEKALAEAVEIMAEALEPAFATGNYQEALSKLAGLRAPVDAFFDNVMVMADDEALKKNRLTLLNKLRNLFLQIADISLLQK

SEQ ID NO: 76943 - protein, 330 aa, Vibrio cholerae
MSGNIWVYFSVIFYQFRQKNRANLTMQKYDIKTFQGMILALQDYWAQQGCTIVQPLDMEVGAGTSHPMTCLRALGPEPIATAYVQPSRRPTDGRYGENPNRLQHYYQFQVIIKPSPDNIQELYLGSLRVLGVDPCVHDIRFVEDNWENPTLGAWGLGWEVWLNGMEVTQFTYFQQVGGLECKPVTGEITYGIERLAMYIQGVDSVYDLVWTDGPLGKVTYGDIFHQNEVEQSTYNFEHADVDFLFTYFDQCEKECKYLLELEKPLPLPAYERILKAAHAFNLLDARKAISVTERQRYILRIRNLTKSVAEAYYASREALGFPMCKKSEQK

SEQ ID NO: 76944 - protein, 613 aa, Vibrio cholerae
MPKYRSATTTHGRNMAGARALWRATGVKEEDFGKPIIAVVNSFTQFVPGHVHLKDLGQLVAREIEAAGGIAKEFNTIAVDDGIAMGHGGMLYSLPSRELIADSVEYMVNAHCADAMVCISNCDKITPGMLMAAMRLNIPAIFVSGGPMEAGKTKLSDQIIKLDLVDAMMQGADPKVSDAQSEQIERSACPTCGSCSGMFTANSMNCLTEALGLSQPGNGSLLATHADRKQLFLTAGQRIVELTKRYYEQDDASVLPRNIANKAAFENAIALDIAMGGSTNTVLHLLAAAQEGEVEFDMTDIDRMSRQVPHLCKVAPSTQKYHMEDVHRAGGVMGILGELQRAGLLKDQTRTVLGISLQEQLAQYDVKQTQDPAVHTMFRAGPAGIRTTQAFSQDCRWDTLDDDRQEGCIRDKAHAFSQDGGLAVLKGNLAIDGCIVKTAGVDESILKFRGPAVVYESQEDAVNGILGGQVKAGDVVVIRYEGPKGGPGMQEMLYPTTYLKSMGLGKQCALLTDGRFSGGTSGLSIGHASPEAANGGTIGLVRSGDSIAIDIPNRSITLEVSESELAARRAEQDKLGWKPVDRQRTVSLALKAYASMATSADKGAVRDKSKLEG

SEQ ID NO: 76945 - protein, 319 aa, Vibrio cholerae
MRIRKAIMATKTADYIWFNGEMIPWANATVHVLTHAMHYGTSVFEGVRCYNTPKGPIIFRHREHAQRLLDSAKIYRFPIPYSIETIMEATRETLRVNKLDNAYIRPLAYVGNVGLGVCPPVGTEMDLMIAAFPWGAYLGEEALENGVDAMVSSWHRAAPNTIPTAAKAGGNYLSSLLVGGEARRHGYAEGIALSVDGYLSEGAGENIFVVKNGVILTPPTTSSILPGITRDSIMTLARDMGYEVREANISREALYLADEIFMTGTAAEVVPVRSVDKITVGAGKRGPITKVVQDAYFGLFKGTTEDKWGWLDYVYPAAK

SEQ ID NO: 76946 - protein, 340 aa, Vibrio cholerae
MVKGSVMSPFYSMTQATFHFDALTPDLIWYALESIGIRAESGFLPLNSYENRVYQFTDEERRRFVVKFYRPQRWTDEQIQEEHDFALELEQEEIPIVPPLRLNGATLHHYQGYRFALFTSMGGRQYEVDNEEHLEWVGRFLGRIHKVGASKPFLHRPTLSLDEYLHQPRHTLEYSHCIPAHLQRVFFHDLDILIAEIKQHWVPTQPQIRLHGDCHPGNILWRDGPMFVDLDDARNGPAIQDLWMLLHGDRQDKLIQLDIVLEGYQEFCDFNPQQLKLIEPLRGLRMVHYMAWLAKRWQDPAFPIAFPWFNDAKYWENQILAFKEQIATLQEPPLSLQPQW

SEQ ID NO: 76947 - protein, 215 aa, Vibrio cholerae
MSMSNSYGFKEEVANAISHGVGLILGIVGLVLLLVKAVDQQADALTITSMSIYGGSMIALFLASTLYHAIPYQRAKRWLKTFDHCAIYLLIAGSYTPFLLVSLRTPLAVGLMIVIWSLALIGILMKIAFVYRFKKLSLVTYLTMGWLSLIVIYQLAIHLEVGGLTLLAAGGLIYSLGVIFYVAKRIPYNHAIWHAFVLAGCACHFLAIYLYVEPI

SEQ ID NO: 76948 - protein, 458 aa, Vibrio cholerae
MKIIILGAGQVGGTLAENLVGENNDITVVDKNADRLRDLQDKYDLRVVNGHASHPDVLREAGAQDADMLVAVTNTDETNMAACQVAFTLFNTPNRIARIRSPQYLAEKEALFQSGAVPVDHLIAPEELVTSYIERLIQYPGALQVVSFAEEKVSLVAVKAYYGGPLVGNALSALRDHMPHIDTRVAAIFRQGRPIRPQGTTIIEADDEVFFVAASNHIRSVMSELQRLEKPYRRIMIVGGGNIGASLAKRLEQTYSVKLIEHNYQRAEQLSEQLENTIVFCGDAADQELLSEENIDQVDVFIALTNEDETNIMSAMLAKRMGAKKAMVLIQRSGYVDLVQGGVIDVAISPQQATISALLTHVRRADIVNVSSLRRGAAEAIEAIAHGDESTSKVVGRAVGDIKLPPGTTIGAIVRGEEVLIAHDRTVIEQDDHVVMFLVDKKYVPDVETLFQPSPFFL

SEQ ID NO: 76949 - protein, 434 aa, Vibrio cholerae
MAFCLGFIMNVRAAAASALYQVVDLGHSLSNALPAAQQQIRPRDHALLQEICYGVLRQLPRLESISQALMGKPLKGKQRVFHFLILVGLYQLSFMRIPAHAAVGETVEGAQDLKGPRLRGLINAVLRNYQRDQEGLDAQATSHDAGRYGHPGWLLKLLKESYPEQWQQIVEANNSKAPMWLRVNHQHHTRAEYQALLEQAGIVTTPHAQAEDALCLETPCDVHQLPGFAEGWVSVQDAAAQLALTYLAPQAGELILDCCAAPGGKTAHILERTPESQVVAIDCDETRLKRVRENLQRLELTAQVICGDARYPQQWWQGEQFDRILLDAPCSATGVIRRHPDIKWLRRADDIAALAELQREILDAMWQQLKPGGSLVYATCSITPQENRLQVKAFLERTPDARLVGSDPAQPGRQILPGEEAMDGFYYAVLSKQH

SEQ ID NO: 76950 - protein, 391 aa, Vibrio cholerae
MISPKPSHFFDQGSKVMARLTRYITYALLPFTLLSGQVTADEQTPLALKPNAPTTYTVVKGDTLWDISALYLDSPWLWPRLWQVNPEIDNPHLIYPGDKLTLFWRDGQPELSLKPMRKLSPQVRVLEKQAVPTVQEGLVLPYLQSDRLMAKTALQGSVRVIGSSEGRQYLTKQDQLYISGVHSEKKWGIYREVAQYQRDDEVMVALRLVAVGELAMTGGNFSGLSLLEQNQEILANDIALPEVDLEERQLSTTFYPQPAPAGSEARILGSLEGSQYAGQNQVVVIDQGRSDGVAQGSMFELYQAAVQVKAKQDSSTFLSERSNTDVQLPSVKVGALMVIRPYERFSLALITNSSAPISAEVHALSPQAEPQTEQPDVVQLSEQIDLVDDAS

SEQ ID NO: 76951 - protein, 278 aa, Vibrio cholerae
MASQIDQYAVFGNPINHSKSPFIHTLFARQTQQSMIYTAQCVPVDGFTEAAKHFFAQGGRGCNVTVPFKEEAYRFADRLTERARLAGAVNTLKKLDDGEILGDNTDGEGLVQDLLAQQVLLKGATILLIGAGGAARGVLKPLLDQQPASITVTNRTFAKAEQLAELVAAYGEVKAQAFEQLKQSYDVIINSTSASLDGELPAIDPVIFSSRSVCYDMMYGKGYTVFNQWARQHGCAQAIDGLGMLVGQAAESFMLWRGLRPGTKQILRELRKNLEGAL

SEQ ID NO: 76952 - protein, 440 aa, Vibrio cholerae
MVRLVFPRHLSALIGHVQYALLQAKEQGVAIQHIRLDVGSEAQFILEKSEESLRIGSSLCSQKEGFEPCDYYLDYVSENRVLPEAMMCNARCTVTVGLHDEYGFTLDKWQYGHAAEQLIVYPSENHRLNSKVNQHLAWVLATLTLDFSIGDGLCIARAAITQGDSVSRETWPTQFERFPAVQSNIRSLSTQVFLTTRAFPTIDKAKFNLYPVVDDVNWIEHLLKLGVRTVQLRIKDPKQGDLEAQIIRAIALGREFNAQVFINDHWQLAIKHQAYGVHLGQEDLTSANLTELLDAGIRLGLSTHGYYELLIAAGIQPSYIALGHIFPTTTKQMPSKPQGLVRLAAYQRLVNQMPYQGQHGIPTVAIGGIDCRNIRDVLDCGVTAVAVVRAITESPDPSLAVQALSSAFADFVDAEYKLMPASESCEPLSYLAMEVADAHR

SEQ ID NO: 76953 - protein, 256 aa, Vibrio cholerae
MLKIADKTFQSRLFTGTGKFSNRHVMAEALAASGSELVTMALKRIDLAQRDDDILAPLLSMQMNLLPNTSGAKNAADAVYAAELAREALATNWLKLEIHPDPKYLMPDPIETLLAAEQLVKQGFIVLPYCHADPVLCKRLEEVGCAAVMPLGSPIGSNQGLASKTFLEIIIDQAKVPVIVDAGIGSPSDAAQAMELGADAVLVNTAIAAAHDPIAMAKAFKLAVEAGRMAYESGLPSRVKMATASSPLTGFLDFVS

SEQ ID NO: 76954 - protein, 398 aa, Vibrio cholerae
MAVMSKTVDVVIIGAGAAGLMCAAQAARRGRQVLLLDHAKKPGRKILISGGGRCNFTNYDVSAANYLCQNPHFVKSALSQYTNWDFISLVSKYGIAFEERDHGQLFCLDSAKEIVDMLLSECDQPNIEQRYQVEISAIAHTEQGFTLQTTIGEIECASLVVATGGLSMPKLGATPFGYKIAEQFGLPVISTSAGLVPFTLHVQDKEDFAPLSGVAIPVEMRAECGKTFKEALLFTHRGLSGPAVLQISSYWTPGQTITTNLVPDVDLAELLSSEKEAHPNQSLKNTLSKVLPKRLVEVLIERQLFADKPLKQYSPKELDAVQTRLEQWSIVPNGTEGYRTAEVTLGGVDTDCLSSKTMECKTVKGLFFIGEVMDVTGWLGGYNFQWAWSSGYVAGQWV

SEQ ID NO: 76955 - protein, 260 aa, Vibrio cholerae
MTDTNVLANSATDNQETTHFGFETVRKDEKVHKVAQVFHSVAAKYDIMNDLMSGGIHRLWKRFTIDCSGARPGQRILDLGGGTGDLTAKFSRIVGEKGHVILADINNSMLNVGRDKLRDSGVVGNVHYVQANAEELPFPDNYFDCITISFCLRNVTDKDKALRSMFRVLKPGGRLLVLEFSKPILEPLSKLYDTYSFHILPKMGQLIANDADSYRYLAESIRMHPDQETLKGMMEEAGFEQTTYYNLTGGIVALHRGYKF

SEQ ID NO: 76956 - protein, 347 aa, Vibrio cholerae
MSVSIQGQFPGRRLRRLRKHDFSRRLVAENQLSVNDLIYPMFILMGKDRREKVDSMPGVERLSIDLMLEEAQYLANLGVPAIALFPVVNQDAKSLCAAEAYNPEGLVQRAVRALKEHVPQMGVITDVALDPFTTHGQDGIIDEQGYVLNDETTEVLVKQALSHAQAGADVVAPSDMMDGRIGRIRQALEEAGYIHTQIMAYSAKYASNYYGPFRDAVGSSANLKGGNKKNYQMDPANSDEALHEVAMDINEGADMVMVKPGMPYLDVVRRVKTELQVPTFAYQVSGEYAMHKAAIMNGWLKERETVFESLLCFKRAGADGILTYFAKEVAEWLAEDSAKAAQFLPKK

SEQ ID NO: 76957 - protein, 934 aa, Vibrio cholerae
MAHIPDNPLILIDGSSYLYRAFHAYPGTMSNGEIPTNAIYGVVNMIRSMMRQFASDRMAVIFDAKGKTFRDEMYDQYKAHRPPMPDELRCQVEPLHQVIRAMGLPLLAIEGVEADDVIGTLARQASQAGMPVLISTGDKDMAQLVDDNITLINTMTNVVLDREGVIEKFGIPPELIIDYLALMGDKVDNIPGVPGVGEKTATALLQGIGGLEALYANLDKIAALGFRGSKTMAQKLEENRGNAKLSYQLATIKCDVELEESPQTLLKQTPDRDALMSLYGKLAFKSWLTELLDGGTGIVTADEQTKTSSVTVSTAATHAAAIPESPAAHIDRSQYQTILNEQDFQLWLEKLKQAELFAFDTETDNLDYMVANLVGMSFAVAEGEAAYLPVAHDYLDAPQQLERDWVIAQLKPLLEDESKAKVGQNLKYDASVMARYGVELRGIRHDTMLQSYVYNSVGGKHDMDSLALRFLQHSCISFEQVAGKGKNQLTFNQIALEEAAQYAAEDADVTLRLHQRIHPLIEQDAKLEQVYREIEMPLVPVLSRIERTGVMIDDMLLSAQSQEIALRLDQLEQNAYELAGQPFNLSSPKQLQTILFEQMKLPVLQKTPSGTPSTNEEVLQELALDYPLPKVLIEYRGLAKLKSTYTDKLPKMINPSTGRVHTSYHQAVTATGRLSSTDPNLQNIPVRNEEGRRIRQAFVAPHGWKIMAVDYSQIELRIMAHLSGDQALLDAFRDGKDIHAATAAEIIGVPIDQVSSEQRRRAKAVNFGLIYGMSAFGLAKQLGIPRGEAQEYMDKYFERYPGVMQYMEDTRSRAAQLGYVETIFGRRLHLPEITSRNAMRRKAAERAAINAPMQGTAADIIKKAMLLVDEWIEREGDGRVKLLMQVHDELVFEVKESSLSEIESKVQQLMESAAELAVPLVAEAGHGDNWEQAH

SEQ ID NO: 76958 - protein, 223 aa, Vibrio cholerae
MRGTPEWYWKLDNYKWNVMKKLALILSVLASCSVWAQGSIEAGKAKSLTCAACHGADGNSPLTIYPKLAGQHEKYLEKQLKELKLGASSGGKQGRYDPVMSAMAMPLSDEDIADLAAYYASMPISGNTTPEDVVAQGKVLYTAGDASRGLTACIACHGPRGNGTELSGFPKISGQHADYIKAQLEKFRSGTRANDMNEMMRDVAHKLTDADIDILSKYVGGLH

SEQ ID NO: 76959 - protein, 317 aa, Vibrio cholerae
MDRNIIMTETPIRIATRQSPLALWQANYVKDALMAAHPGLQVELVTMVTRGDVILDTPLAKVGGKGLFVKELEIAMLEGRADLAVHSMKDVPVDFPDGLGLVTICEREDPRDAFVSNTYAKIEDLPSGAIVGTCSLRRQCQLKAARPDLVIKELRGNVGTRLSKLDAGEYDAIILAAAGLKRLELESRIRSFIEPEQSLPAVGQGAVGIECRVNDQRVRALLAPLNHADTADRVRCERAMNLTLQGGCQVPIGSYALLEGDTIWLRALVGEPDGSQIVRGEIRGPRTQAEQLGITLAEQLLSQGAKEILERLYCDHE

SEQ ID NO: 76960 - protein, 311 aa, Vibrio cholerae
MKNDERTPLPDALAQPLERFYAYLHTEKGLSLYTQRNYKQQLETMTQYLVQVGLTHWTQLDSAWVRQLVMQGKRQGMKASSIATRLSSLRSFLDFLILRGELQANPAKGVSAPRKQRTLPKNLDVDEMAQLLEVTDDDPLSIRDRAIMELMYGAGLRLAELVSIDIKDVNLSEGEIRVIGKGNKERKVWFAGQAQEWVGKWLKLRSQLADSAETALFVSKLGTRISHRSVQKRMAEWGQKQAVASHISPHKLRHSFATHMLESSNNLRAVQELLGHENIATTQIYTHLDFQHLAQVYDQAHPRARKKNKDD

SEQ ID NO: 76961 - protein, 239 aa, Vibrio cholerae
MLFYRPLASIQALTFDLDDTLYDNRPVIKQVEEKVTEWLLSEHPITATRPLAWWLAMKRDIARRFPEQCHDVSQWRYLQVQHGLLELGYAQPEAEQAASETLEQVMRWRNQVDVPAETHRVLAQLAAKVPLIAITNGNVQIEKIGLSGYFQTVLRAGPDGRAKPYPDLFAQAAQQLQLEPRSILHVGDHLQTDVLGARQNGFQACWFNDQGQSIRRLAKASVLPDVEIERLSELLLIVN

SEQ ID NO: 76962 - protein, 275 aa, Vibrio cholerae
MTTSAHKHPYKIVASDLDGTLLAPNHQLSEFSKQTLKQLHDKGFTFIFATGRHHIDVAGIREIAGIPAYMITSNGARVHDQNDQLMYSKNVPQDLVQAIIDVVKHDKQLFVHLYRNDEWMLNKEDEILRDFHEDSGFTYRVFDVNNAPTDGIAKIFFTQEDQDHEHLVQYETLLNQRFGDKLNVAFSTPWCLEVMCAGVSKGDALQAVAESLHLGLENCIAFGDGMNDVEMLSMAGKGLVMGTAHEKVFNALPDNEVIGSNADDAVAHYLHQHLF

SEQ ID NO: 76963 - protein, 338 aa, Vibrio cholerae
MNPEKNLYPYTQESSLEQALNFEIAQVWHTRSEGTYRSFDKTHIYWCSLKHPEHQKAVVIVNGRIESAWKYQELCYDLFRQGFDVYTYDHRGQGRSERLTEDRQIGHVHEFQDYVTDLKALVEHFDLGHYQERFLLAHSMGGAIATRYIQTTPAHPFSALALSAPMFGVNMPWYLRPWALLITQIMAAVTLKPSYAPGYGPYHAKPFHLNLLTHSETRYQLFRELYEAHPELQIGGPSHRWVWQSLMATKQCLQLTRQIKIPMLILQAGEEAIVCNRAQIRLFKKLSRTQKRAALCRIAGARHELLFEQDAYRNQTLDHILRFFADSTIDHKRQHHRP

SEQ ID NO: 76964 - protein, 205 aa, Vibrio cholerae
MDIHVWLAYLLTAVVFSLAPGSGTVNSISNGLSYGTRHSLGAIIGLQIGLACHIVLVGIGIGALVAQSALAFTLIKWIGAAYLVWLGIQKWRDRAPLTATTTSHELSQAALLRKAVLINLTNPKSIVFLVALFPQFIDPTRDHWPQFLVLGITTVTIDAIVMFGYTALAAQLGRYIRSPNIMTRMNKLFGSMFMGCGMLLATAKA

SEQ ID NO: 76965 - protein, 156 aa, Vibrio cholerae
MATNLIGLDTTQSQKLANALNNLLANYQVFYMNTRGYHWNIQGKEFFELHAKFEEIYTDLQLKIDELAERILTLSARPMHSFSGYLKAAQIKEHTDSIDGRSSMQGLVDGFSILLHQQRDILELAGETGDEGTSALMSDYIREQEKLVWMLNAWLK

SEQ ID NO: 76966 - protein, 391 aa, Vibrio cholerae
MTEKKKRGLLSWLGFGDEEKSQTTATDTQTQDEPQSQADVEAVAIQTETALTETETETETETETETETETATVEPARIVEQEKPTESFFARLKRSLSRTKANIGAGFFGLFKGKKIDDDLFEELEEQLLIADVGMDTTSKIIANLTARASRQQLRDGEALYGLLKEEMAEILSQVEQPLVIDTEKKPYVILMVGVNGVGKTTTIGKLAKQFQAQGKKVMLAAGDTFRAAAVEQLQVWGERNQVPVIAQHTGADSASVIYDAIEAAKARGIDVVIADTAGRLQNKSNLMEELRKIVRVMKKIDDSAPHEIMLTLDAGTGQNAISQAKLFSDVAPITGITLTKLDGTAKGGVIFAIADQFQIPIRYIGVGEKIDDLRPFATQEFIDALFSREE

SEQ ID NO: 76967 - protein, 466 aa, Vibrio cholerae
MGQKNHFDVIVIGSGPGGEGAAMGLTKGGKNVAIIEKESSVGGGCTHWGTIPSKALRHAVSRIIEFNSNPLFCKNNSSIHATFSTILSHAKSVIDKQTRLRQGFYDRNQCTLIFGAAHFIDAHTVAVKKADGSIDTYSADKFVIATGSRPYHPKDVDFGHPRIYDSDSILNLEHDPRHIIIYGAGVIGCEYASIFRGLDVKTDLINTRDRLLSFLDNEVSDALSYHFWNSGVVIRNDETYDKVEGTSDGVIVHLKSGKKMRADCLLYANGRTGNTDKLNLESVGLQADSRGQLVVNANYQTQVEHIYAVGDVIGYPSLASAAYDQGRFVAQAIIHGQAAHLLTEDIPTGIYTIPEISSVGRTEQELTAAKVPYEVGRASFKHLARAQIAGKDIGSLKILFHRETKEILGIHCFGERAAEIIHIGQAIMEQKGEANTIEYFVNTTFNYPTMAEAFRVAALNGLNRLF

SEQ ID NO: 76968 - protein, 265 aa, Vibrio cholerae
MSSPSFPRVLIFDSGVGGLSVYREIEARLPQLNYIYLFDNAAYPYGELTQETLIARVDTLVTRMVEQERIDLVVIACNTASTIVLPVLRAKLTIPVVGVVPAIKPASLIASKAIGLIATPATVKRQYTQELIRDFSANKNVELLGSTRLVNMAEEKLRGKPLDLEELASILQPLKNTIDVAVLGCTHFPLIKEEIQQVLGEQVQLIDSGLAIARRVQELLGIEQAVGAKQKHRIYASAPPWEESALNIKLEQLGFNPVQPFLHPI

SEQ ID NO: 76969 - protein, 494 aa, Vibrio cholerae
MANYFNTLNLREQLDQLGRCRFMAREEFATEADYLKGKKVVIVGCGAQGLNQGLNMRDSGLDVSYALRQAAIDEQRQSFKNAKNNGFNVGSYEQLIPTADLVINLTPDKQHTSVVNAVMPLMKQGAALGYSHGFNIVEEGMQIRKDITVVMVAPKCPGTEVREEYKRGFGVPTLIAVHPENDPQGEGWEIAKAWAAATGGHRAGCLASSFVAEVKSDLMGEQTILCGMLQAGSIVCYEKMVADGIDPGYAGKLLQFGWETITEALKFGGITHMMDRLSNPAKIKAFELSEELKDLMRPLYNKHMDDIISGHFSSTMMADWANDDKDLFGWRAETAETAFENYPTTDVKIAEQEYFDNGILMIAMVRAGVELAFEAMTASGIIDESAYYESLHELPLIANTVARKRLYEMNVVISDTAEYGNYLFANVAVPLLREKFMPKVGTDVIGKGLGVVSNQVDNATLIEVNSIIRNHPVEYIGEELRGYMKDMKRIAVGD

SEQ ID NO: 76970 - protein, 1036 aa, Vibrio cholerae
MRFTDVFIKRPVLAVSISFLIVLLGLQAIFKMQVREYPEMTNTVITVSTGYYGASADLIQGFITQPLEQAVAQADNIDFMTSQSVLGRSTITVTMKLNTDPNAALSDVLAKTNSVRSQLPKEAEDPTVTMSTGSTTAVLYIGFTSNELASSQITDYLERVVNPQLYAVNGVSSIDLYGGMKYALRVWLDPAKMAALNLSAADVMSILNANNYQSATGQAIGEFVLYNGSADTQVSTVEDLESLVVKAEKGTVTRLGDIAKVTLAKSHDTYRASANGREAVVAAINAAPSANPINIAKDVLEMLPELQKNMPSNIEMNVLYDSTVAINESIHEVIKTIVEAALIVLVVITLFLGSLRAVLIPIVTIPLSLIGVAMVMQMMGFSWNLMTLLAMVLAIGLVVDDAIVVLENVDRHIKEGESPFRAAIIGTREIAIPVIAMTLTLGAVYAPIALMGGITGSLFKEFALTLAGSVFVSGIVALTLSPMMCSKMLKANEAPNKFELKVHHLLDRMTARYERMLTAVMAHRPVVIAFAFIVFASLPMLFKFIPSELAPSEDKGVIMLMGTGPSNANLDYLANTMDDVNKILSDQPEVQFAQVFTGVPNSNQAFGIASMVPWSQREASQATVTNRVGTLVQDIPGMAVTAFQMPELPGAGSGLPIQFVITTPSNFESLFTIATDVLTEVKANPMFVYSDLDLNFDSATMKINIDKDKAGAYGVTMQDIGITLSTMMADGYVNRIDLNGRSYEVIPQVERKWRLNPESMNSYYVRAADGKVIPLGSLVTIDVVAEPRSLPHFNQLNSATVGAVPAPGTAMGDAINWFENLASSKLPKGYSHDYMGEARQYVTEGSALYATFGLALAIIFLVLAIQFESLRDPLVIMVSVPLAICGALIALAWGTATMNIYSQVGLITLVGLITKHGILICEVAKEEQLHNKLSRIEAVMHAAKVRLRPILMTTAAMIAGLIPLMYATGAGAAQRFSIGIVIVSGLAIGTLFTLFVLPVIYSYLAEKHKPLPVFVEDKDLEKLARIDEAKAAHRQL

SEQ ID NO: 76971 - protein, 671 aa, Vibrio cholerae
MKLNPRQDEAVKYVSGPCLVLAGAGSGKTRVITNKIAYLVQQCGYKARNIAAVTFTNKAAREMKERVAQTLGKGESRGLMVSTFHTLGLNIIRREFKALGLKAGFSLFDDQDQLALLKELTEKQLDGDKDLLRLLLSTISNWKNDMLTPPQAKAMAKGEQQLLFAHCFELYQKQMQSYNALDFDDLILLPVLLLRSNEEVRQRWQNRIRYLLVDEYQDTNTSQYELVKLLVGERGRLTVVGDDDQSIYSWRGAKPQNLVLLGEDFPSLKLIKLEQNYRSTSRILRAANILIANNPHVYQKALFSELAEGEKLKVILANNEDHEAERVIAEIIAHKFLNRTEYRDYAILYRGNHQSRLIEKSLTQNRVPYKLSGGTSFFARAEIKDIMAYLRVLVNPDDDNAFLRIVNTPKREIGPATLEKLGSYANMRGKSLFTASFELGLEQHLSGRGLENLRRFTEWLVAIADNAERGNTVEAVRALVRDIRYEDWLYETSASPKAAEMRMKNVSDLYSWIVADLEGDNPDQQEKTLKEVVQRLTLRDMMERGEENDDSDAVQLMTLHASKGLEFPYVYLIGAEEGILPHQTSIDEENVEEERRLMYVGITRAQRELTFIVCKERRQFGELIKPSQSRFLDELPQDDIEWEVKKKPVTQEERMAKGQAHIANLRAMFKK

SEQ ID NO: 76972 - protein, 571 aa, Vibrio cholerae
MSLLEVKNLRIEYPSRHGVHAAVKSLTLDIQRGEIVGVVGESGAGKSTVGNAVIDLLSPPGTIAGGEVYLNGEKISGLSPQAMREVRGSKIGFIFQDPMTSLNPLFTVEHQLTETIHANMQVSAEEAYQRALSLMKQVGIPQPENRLKQYPHQFSGGMRQRVVIAIALAGEPDLIIADEPTTALDVSIQDQILNLIRELCKKNNVGCMLVTHDMGVVSNVTDRVAVMYRGDLVEFGPTAKVLGTPEHPYTRSLISAVPRSDRKLDRFPLVSYIEEAKELKPLDVKSHWLGQSQDHRKYTGPLLKVENVNLRFVTKDSLFESRREYVQASNNVSFAVHEGETFGLVGESGSGKSTIARVIAGLYQPNAGRVTFEGIDLTALKSEHERRPLRRQMQMVFQNPYTSMNPRMKIFDIIAEPIRFHKLTRSESETRQIVNDLLEHVGLGKMAGLKYPHEFSGGQRQRISIARALATRPRLLICDEPTSALDVSVQAQILNLLKDLQDELNLTMLFISHDLPVIRQMCDRVGVMQMGTLLEVAPTEQLFTDPQHEYSKKLISLMPEFTGLRESTTAA

SEQ ID NO: 76973 - protein, 542 aa, Vibrio cholerae
MGWRLLQKQIQQTRDLDSRIRSYAMKTMKNKLALALIAAGLSFGAMAADITVAYDADPVSMDPHEQLSGGTLQLSHMVFDPLIRFTQKMEFEPRLAESWQRVDNETMRFTLRKGVKFHSGNDFTADDVVWTFNRLKESADFKGIFEPLVSLTKVDDYTIEIKTAGTYPLIENVATYIFPMDSKFYTGTTADGKNKAEIVKHGNSFASENISGTGPFTVTAREQGVKLEFQRNPNYWDKASKGNVDKLTLAVIKEDATRVAALLSGGVDMIAPVSPNDYQRIKDAKGVDLFTMPGTRVITFQMNQNSNPALKDVRVRQAIVYAINNEGIVDKVMKGAATTAAQQSPVGYAGYNENLKPRFDLNKAKELMKEAGYEKGFNLTMIAPNNRYVNDEKIAQAASAMLSKIGIKVDLKTMPKAQYWPEFDKCAADMLMIGWHPDTEDSANFTEFLTMTRDSNTGKGQYNCGYYSNAEVDKLVNAANEETDLEKRSTMLKKVEEILYNEAAFVPLHFQDPSWAAKNTLDIAPIINGMDFPYFGDLVVKE

SEQ ID NO: 76974 - protein, 454 aa, Vibrio cholerae
MEKVMATHFDYLCIGGGSGGIASANRAAMYGAKVALIEAKDLGGTCVNVGCVPKKVMWHGAQIAEAMHLYAEDYGFDVDVKNFNWAKLVESRQAYIGRIHQSYDRVLGNNKVHVIKGFAKFVDAKTVEVNGELYTADHILIAVGGRPSIPNIPGAEYGIDSNGFFELSEQPKRVAVIGAGYIAVEIAGVLNALGTETHLFCRKESPLRSFDPMIIETLVEVMNSEGPQLHTHSVPKQVVKEADGSLTLHLENGQTYNVDTLIWAIGRHPATDAINLAATGVATNEQGYIKVDEFQNTNVAGIYCVGDIMEGGIELTPVAVKAGRQLSERLFNNKLNAKMDYQLVPTVVFSHPPIGTIGLTEPQAIAQYGAENVKVYKSSFTAMYTAVTSHRQPCKMKLVCAGPEETVVGLHGIGFAVDEMIQGFGVAMKMGATKADFDSVVAIHPTGSEEFVTM

SEQ ID NO: 76975 - protein, 279 aa, Vibrio cholerae
MLSYRHSFHAGNHADVLKHIVQSLILNSLQQKEKPFVYHDTHSGVGRYDLTHEWSEKTGEYKQGIARIWQQDNIPAELDSYLDAIRQLNQGETLRYYPGSPRVARAHLREQDRMVLTELHPSDYPLLEQEFHRDRQVSIYKEDGFARLKASLPPQERRGLVLIDPPYELAKEYRDVVRAIAQSYKRWATGIYAIWYPVVNRCDIDDMLEGLQGLEIRKILQIELGVAPDTNERGMTASGMIVINPPWTLESQMQTILPFLKQAIAPATGHYKVEWVVPE

SEQ ID NO: 76976 - protein, 723 aa, Vibrio cholerae
MIDPSLLLDGLNDKQREAVAAPLENLLILAGAGSGKTRVLVHRIAWLMSVEEASPFSVMAVTFTNKAAAEMRGRIEELMHGTASGMWCGTFHGICHRILRAHYLDAKLLEDFQIIDSDDQQRLLKRLIKAHNLDDKQWPARQVAWWINNQKDEGLRPTHINAFDPVTQTYLKLYTAYQEACDRAGLVDFAEILLRALELLRGNQHIREHYQARFKHILVDEFQDTNAIQYAWLRMMAGAQSNVMIVGDDDQSIYGWRGARVENIEKFTREFPSVNTIRLEQNYRSTKTILEASNTLIANNSERMGKQLWTDGLVGEPISVYSAYNELDEARFVVSKIKGWQEQGGTLTDCAILYRNNAQSRVLEEALLQASLAYRIYGGMRFFERQEIKDALSYLRLINNRNDDTAFERVINTPPRGLGDKTLETIRFAARDRGCTLWDASVGLLNDQVLTGRAASALSRFVELINALEEEGIDMPLHVLTDHAVKTSGLLEMYQQEKGEKSKARIENLEELVTATRQFEKPEEAQEMTMLTAFLTHAALEAGEGQADEHDDAVQLMTLHSAKGLEFPLVFMVGVEEGMFPSQMSAEEAGRLEEERRLCYVGMTRAMQKLYITYAEMRRLYGQDKYHKPSRFIRELPEGCLDEVRMKAQVSRPTSTGRFSQTVVKESFNETGFNLGSRVRHPKFGEGTIINFEGSGPQSRVQVAFNGEGIKWLVTAYARLEKV

SEQ ID NO: 76977 - protein, 588 aa, Vibrio cholerae
MEMGMNWTHTPLALSALMFAMAAQATPNQATDAVAPEQATGFEHKSLVKAKNWMVTAANPLASEAGASILRQGGNAIDAMVTTQLMLGLVEPQSSGIGGGSFLVYWDAKKKALTTFDGRETAPLNATPELFLDSTGQPMKFYDAVVGGRSVGTPGTVKLLWETHRQYGKLEWARLIEPVAKLAEQGFEVSPRLAALIAEDKERLGRFPATKAYFFDAQGEPLTAGTLLKNPDYAATLRAIAQQGASAFYQGDIAKDIIATVQNAPGNPGVLAQQDFDTYQVKQRAPVCAAYQSYQVCGMGLPSSGGLTVGQILALTEQYDLKGWGAQDVKSWQVLGDASQLAFADRGLYMADQDYVPVPTQGLLDKTYLAERAKLIQPGKALTSAPAGNPPWHHAQLRSPDQSIELPSTSHFNIVDREGNVVSFTTSIENAFGSRLLVRGFLLNNELTDFSFATQSEGRPIANRLEPGKRPRSSMAPTIVLQDNQPYLAIGSPGGSRIIGYVAQAIVAHTQWGMNIQAAINQPHVLNRFGEIELEQGTSAEQFKPALESLGAKVGIKELNSGLHAIRITAQGLEGAADPRREGVAIGE

SEQ ID NO: 76978 - protein, 620 aa, Vibrio cholerae
MTLTLHSIDMTATLMAESSALFATPERVLHEVFGYQQFRVGQQEVIEAALAGRDSLVIMPTGGGKSLCYQIPALVLEGVTLVISPLISLMKDQVDQLKANGVAAECVNSTLAREELIAIYNRMHAGQLKLLYVSPERVLTAEFIERLSHLPLAMIAVDEAHCISQWGHDFRPEYASLGQLKQRFPNVPVMALTATADDATRHDIMQRLQLNEPHQYLGSFDRPNIRYMLVEKHKPVSQVIRYLETQRGQCGIIYCGSRKKVEMLTEKLCGNHIRAASYHAGMDADERAWVQEAFQRDDLQIVVATVAFGMGINKPNVRFVVHFDIPRNIESYYQETGRAGRDGLPAEAMMLYDPADMNWLRRMLDEKPDGAQKQVESHKLTAMGAFAEAQTCRRQVLLNYFGEYRDKPCGNCDICLDPPKRFDATEEARKALSCVYRVNQNFGIGYVVEVLRGMQNIRIREHGHDKITTYGIGRDHSHDYWVSIFRQLIHKGMLYQNITRNSTLQLTEEARPLLRGEMNIELAVPRLDTAARAAKSDKLSGKNYDKKLFAKLRKLRKSIADDEGLPPYVVFSDATLIDMAEIMPTSYGEMLAVNGVGQRKLEKYADPFLDLIQEHLTYHG

SEQ ID NO: 76979 - protein, 718 aa, Vibrio cholerae
MRKINTNKNDSQIYSRGFIMRNIRPSQLGQYIRRALRLHFIPVVLVAAPSVMANTNQETEQLETLVVTASALKVETPAQETPKALSIVTQEEIVARAPQKLDEALRYTSGVTAQPYGADNDTDWLKVRGFDAATYQDGSRLFRDGYYTWLIEPYALERIEVLKGPASILYGEAPPGGVVNAVQKKPTDIPQGEVGLQVGNDALRTLTLDISDYANQDGSVRYRLVALMKENDGQLNGTQTSRNYLAPSLSIDISEQTRLTLLASFLEDSGVPTNPFFPAAGTLIDSNFGHIDPSTNLGQPDYDKYERRQVSLGYLFEHDLNDVWALSQTFNYGDNDLYLRSSYAFSNDDPSKDTLTQGIVFRDGSTESLSLDNKAVAKWDSARVENTLLMGLELQRHQTQGVELDNYSFGTINPFNPNYGNFTPIDESSAADRTITKEQASLYAQYQIKLDQQWIGLIGGRMDWVDTENESQKNMQRKSRSDAEFSFNAGLMYLASNGVSPYLSYSQSFDVLSTIDSAKGELYKPLKGEQTEVGVKYQPEFYDGYINLAWFDITQQNALVTNPTTFVATQTGEMTAQGIEVESVGYVTDSLKLTASYTFTDAKTDETGGKGTQQAGLIPKHQASAWLDYDAAQLGLQGWTFGSGVRYIGESKDNPRSSDRTVPSVTLVDLMAGYEITENWQVQLNINNLFDREFVSGCDYWCYYGQSRSAVLSANYRW

SEQ ID NO: 76980 - protein, 285 aa, Vibrio cholerae
MAARQLPLLAGFVVFIECQLLGGSMFQLADIQMVRGGRTILAIDHLTIPTHELTVVLGHNGSGKSTLVSLLSGQQSPDNGQVTLNGQSLSSLPSKTLAKAVAFLPQKLPTSAGLTVRELVRLGRFPWRGTLGRWRKEDELIIDAALEKTGVSGFAHNLADELSGGERQRAWVAMLLAQQSPVLILDEPTSALDVHHQYQLMALLAELNQTQGVGIIVILHDLNLALRYATHIVALKQGQIAFEGGAELLLDEQRLSDLYHSPIRLIDHPNPISHSSTNKVSIVCA

SEQ ID NO: 76981 - protein, 319 aa, Vibrio cholerae
MCLMSLWNVRLRNICRPKAVFGWLAALCLFALPVQAQIVLTDSQGTHTFAEVPQRVVVLNWDLLEQVLELGIQPVGAPELSSYVQWVVQPEVPSSVQDIGTRTEPNLEKIAALKPDVILAAGPQQDLLATLGRIAPVVYLPNFSEQDNAAQVAISHFKTLATLFGKEAVAQQKLEAMYARFSELKASLQHAFGDTLPAVVTLRFANPTSVFLYTENSTPQYVLEQLGLSSALPQPPKEWGIVQKRLSELQHVEQGYVLYFLPFAEEKKVQKSVLWRAMPFVQAGRVNSVRPVWSYGGAMSLRYSAEAITESLLAVAPQS

SEQ ID NO: 76982 - protein, 653 aa, Vibrio cholerae
MSVLRLTGLGALTLLLALVSLQWGHNLTLNEQWQLVLGHQAAQSFAQVNFIYAQLPRAVMAIVVGAVLGLVGSLMQQLTQNRLTSPLTLGTSSGAWLGLIIVNIWFSDWVADYSALAAMAGALLAFALIISIAGLRNLTGLPLVVSGMVVNILLGSIATALVLLNEEFAQNVFMWGAGDLAQNGWEWLTWLLPRLALVFPLLLFAPRVLTLLRLGHEGAAARGLAVLPAFLFLMAGGIWLVSASITAVGVIGFIGLLTPNIARSLGARTTKMELYSSALLGALLLLATDMLAMGLSVWAEEVVPSGITAAVIGAPALIWFSRRQLQAQDSLSISLSSHRRSPSRWAVMLIAAALLLALSLHIGWQMESASWALPSEFQWPLRWPRMLTALFAGVGLAIAGTLLQRLIYNPLASPDILGVSSGATFALVFASLFLGQSLQSTHWMTALLGSAAVLVALLLLGRRHHYAPSSLILTGIAITALLEALVQFTLAKGTGDSYQILLWLSGSTYRATGEQALLLSVGVVGLTLLALGLSRWLTLISIGRGFASARGLSASRASLVLLILVALLCALVTATMGPVSFVGLIAPHMAMMLGAQRAPSQLLLAALVGGTLMLWADWLGQALLFPAQIAAGTLVAIIGGSYFLLLLLSQRAR

SEQ ID NO: 76983 - protein, 482 aa, Vibrio cholerae
MMAKITQTMMAQVLSLVGGSGNVAKCGNCMTRLRLTLNNSALADHAALKKISGVMGVVESDAQLQIILGPGKAQTAADMMNALIESGDNVAPAVSEADLSTIAAQQKKQMKSKQTSAVQRFLSKFATIFTPLIPGFIAAGLLLGIATLLEQIYVVGQTPSEFMLDLVAYLKVFGKGLFAFLSILIGYNAQQAFGGSGVNGAILASLFVLGYDPEATKGIYSGMSEFFGFAIDPRGNIIGVLLAAILGAQVERKVREYMPDDLDMILTSVVTLLIMGAVTFLIIMPIGGELFKGMSWLFLNLNDNPLGAAILAGLFLISVVFGIHQGFVPVYFALMEAQGFNSLFPILAMAGAGQVGASLALYARAKKETTIRTQIKGAIIPGILGIGEPLIYGVTLPRVKPFVTACIGGAAGGFFIGLISYLGLPVGLNTVFGPSGVVAIPLMTSADGIFAGMAVFVGGLLISYTVGFAATYFFGCKDVDLS

SEQ ID NO: 76984 - protein, 288 aa, Vibrio cholerae
MIYSMTAYARKEVKGDWGSAVWEIRSVNQRYLETYFRLPEQFRGLEPLLRERFRQRLSRGKIECHLRFEANPAAQSHLTINEGLAQQVINAANQIMHMTGELSRINPFQVMQWPGVMETPEQDMDAINQALLSAFDEGVDEFIAARGREGDNMKALIEQRLQAISAEVVKVRARMPEILEWQRERLFSKFEEAKIELDASRVEQELILLAQKSDVAEELDRLDSHVKEAREVLKKGGSCGRKLDFMMQEFNRESNTLASKSISTDITASGVELKVLIEQMREQIQNIE

SEQ ID NO: 76985 - protein, 214 aa, Vibrio cholerae
MMKAYQREFIEFALEKQVLKFGEFTLKSGRKSPYFFNAGLFNTGRDLARLGRFYAAALVDSGIEFDVLFGPAYKGIPIATTTAVALADHHDVDTPYCFNRKEAKNHGEGGNLVGSKLEGRVMLVDDVITAGTAIRESMELIQANKADLAGVLVAIDRQEKGKGELSAIQEVERDFGCAVISIVSLTDLITYLEQQGNNTEHLEAVKAYRAQYGI

SEQ ID NO: 76986 - protein, 224 aa, Vibrio cholerae
MSLKQLPTESMPREKLLQRGPQSLSDAELLAIFLRTGTQGMNVLALADLLLRDFGSLRALFCASKEQFCRHKGLGEAKFVQLQAVLEMTQRYLAETLKRGDALTSPQQTKLYLSSVLRDRQREAFYILFLDNQHRVIRDEILFEGTIDAASVYPREVVKRALHHNAAAVILAHNHPSGVAEPSQADRRITDRLRDALGLVEIRVLDHFVVGDGEVVSFAERGWI

SEQ ID NO: 76987 - protein, 78 aa, Vibrio cholerae
MSRVCQVTGKRPAVGNNRSHAKNATKRRFLPNLQTHRFWVESEKRFVKLRLTAKGMRIIDKKGIDAVLVEIRARGENV

SEQ ID NO: 76988 - protein, 55 aa, Vibrio cholerae
MAKGIREKIRLVSSAGTGHFYTTDKNKRNMPGKFEIKKYDPVVRQHVVYKEAKIK

SEQ ID NO: 76989 - protein, 269 aa, Vibrio cholerae
MPELPEVEVSRLGISPHLVGGTIQSLVLRTPKLRWPIPQELKQLEGQTILAIHRRAKYLIIETAVGSAIVHLGMSGSLRILDGDFPAAKHDHVDLVMTSGKRLRYNDPRRFGAWLWCAPDESHEVLGRLGPEPLTEAFNAEYMMDKARNKRIAVKAFIMDNAAVVGVGNIYANESLFTSRLHPLRPAHSLSLEEWQTLVANIKQVLQVAIKQGGTTLKDFTQSDGKPGYFAQELQVYGKAKQPCPHCGEPLCEQKIAQRNTFFCPQCQH

SEQ ID NO: 76990 - protein, 259 aa, Vibrio cholerae
MSKPTLAVALIVKNEARHLDECLQTVHDWVDEIVVLDSGSHDETEQVARRYTEKFYVNAKWPGFGLQRQLAQSYVQSDYVLWLDADERVTPELKQSILQAVAANKPDTLYQFARLSWVFGRFIRHSGWYPDRVLRLYPTQLTRYNDALVHEKVHVEPSMKVETLAGDAIHYTYNDVHHYLVKSAGYAKAWADQRQAKGKKASLSQGIVHAVGCFLKMYLLKRGFLDGKQGFLIALLSAHSTFVKYADLWARDNDEHYKR

SEQ ID NO: 76991 - protein, 399 aa, Vibrio cholerae
MNNKITKTSIFLTISLLLITPGFSVVAVGLLTLYSSVKLIKNGLNLNKFDIIPLITLSAYFLSNLPITIIDGDTLRYLDAGIRALLCIPMYFFIKNEISKGANLDNTLCTSTILASFGALAFAFYQFFILNMPRVDGFLFSINFGYLAAALAILSFGLSFTQTRFKYYLYLSVVAATVATILTLTRGAILTLLFVFILFFIVNVRKIKFKQTLVFTLISFLLVSVSYQFSPRIQERVDFTIFEISSIASNNIHAAASSGGRLQLWYAAVEAFKHNPIWGTTYSERESLNIELFKEGKVDEWTSTVPRGHAHSQYFEAIASNGTLGILAIFAMLILPFGVFLNDYRKTGSPISQTGYLFAFGFIIFCLTEAPLQANLIGTFYGFMVAIFYAYIAAKRAKN

SEQ ID NO: 76992 - protein, 271 aa, Vibrio cholerae
MVWSATSRTKYSIKKSFFGCSMIELSNVNLHYPVPGHFSHSLQTTISSKIGGVLGSSSAKDKEMKYVHALRDINLKLEDSSRLGIIGHNGAGKTTLLRLLSQVYPPTSGKVTIEGKISALTDFTLGMDPNATGLKNIEFRLVFMGCTFKEAQQAVEEIVAFSELGEFINLPVRTYSTGMFLRLAFAISTHFTPDILILDEVIGAGDETFREKALSRLESLIKKSRMVVLSSHDLNAIKQYCDQAIVMEKGEIVFNGTPQSCIDYYLNSVKK

SEQ ID NO: 76993 - protein, 410 aa, Vibrio cholerae
MPWKTYSRNLMYAVITLMLNVLSEFYLMHLRVIRHKNENKMKVLHVYRTCYPETKGGVEQVIRFIASGTKPLGIETKILTLSDNQTSSYYCEGTEIISVKKSIEISSNGFSWKLIRQFKKLSKWADIIHYHYPWPTGDFLSLFGSSNPSIVTYHSDIIRQKCLKKLYQPLESHFLNQANILVATSPQYAHTSENLLRHKNKVKIIPLAVDENTYPIPSNDNINKWREKVGEGFFLFVGVLRYYKGLDFLLEAAKINQLPVIIAGDGPERVKLESYIAKHNLENVKLVGFISEEDKVILHLLSKAFVFPSHLRSEAFGISLIEAQMYCKAIISSDIGTGSSYVNINGETGLVVPPADSQSFSDAMLKIEHDTKLCEKLGINARKRFEQEFTAHRYAQSYTKLYSELFGNVC

SEQ ID NO: 76994 - protein, 621 aa, Vibrio cholerae
MFTPIQLLLSAQRHHKRMITLLYDVFALMFSLYAAIALRLDTLAFTFSFPEFLSMMTTVGVTLYCFVRLGMYRAVLRYMMLPAIGYIFLSVIISAVTLALSGFFFQAFIPRSVPFIYAGLATLTLGGPRIFIRTIYYHYYKRQKPNVFIYGAGSTGRDLAYALIQGDEYHPVIFLDDDPAKTGQIIFGLRVHHSSDFESLRNLYEPVKMLIAINNIGKNTRIKLLERLSHWPIEIQSVPSVEDIAAGRAKATDVQDLDIADLLGRAPVEPDLALLQKNITEKSVMVTGAGGSIGSELCRQILAQKPKTLVLFELNEYNLYTIDQELQAIKQNLKLNTKIVAALGSVQRENRVKKLMQAHQVETVYHAAAYKHVPLVEDNVIEGIRNNVFGTLACANAAIEAGVKNFTLISTDKAVRPTNIMGASKRMAELVLQALADKNSTTIFTMVRFGNVLGSSGSVVPLFKKQIRAGGPVTVTHPDIIRYFMLIPEAAQLVIQAGAMSHNGQVFVLDMGEPVKIVDLAKRMIHLMGMKEFCDGRSDEGDIEIKFTGLRPGEKLYEELLIGENVEGTSHQKIMTACEEKLSWDAMEDLLTELDVCCHNFDVECIKRILLDAPTGYSPQK

SEQ ID NO: 76995 - protein, 184 aa, Vibrio cholerae
MVIRFLDFIFALAGLLLLWPVLLIVCILGYFDTGSPIFCQQRVGKNQRPFTLIKFRTMPKNTASVATHLVGASSVTRLGQFLRKTKLDELPQLINVLKGEMSLVGPRPCLFNQQDLIAERESRGVFTVLPGITGLAQVNEVDMSTPVKLAELDQQMIQTLNLKNYFTYIIQTVLGKGAGDRVKP

SEQ ID NO: 76996 - protein, 455 aa, Vibrio cholerae
MLRRANHGKVAQNRRNNMEVVHHGGKASVTGSCHELRADGQALLIDCGLFQGADERPLAVEFALGHVDALILTHAHIDHIGRLPWLLAAGLKQPIYSTAATAELVPLMLEDGLKLQLGMSPKQSERVLTEVRRLLRVQDYQKWFAVQPKRADSLWVRFQPAGHILGSAYVEIRRPNGEVVVFSGDLGPSHTPLLPDPQSPERADYLFIETTYGDKQHEDVQSRGQRLRAMIERSLTDGGAILIPAFSVGRTQELLFDIEQLIFSQQIDANLPIILDSPMAQRVTRSYRRFKQLWGREAKARLQMHRHPLAFEQCITVEDHRTHERLVNRLASTGEAAIVVAASGMCQGGRIMDYLKALLPDKRTDLILAGFQAEGTLGRSIQSGQPSVWIEGTEVEVNAHIHTMSGYSAHADKADLLRFITGIPEKPKQVHLIHGEAPAKQAFAAELTQLGYSVL

SEQ ID NO: 76997 - protein, 399 aa, Vibrio cholerae
MNTAIPAPFFIMHNVIQSYAWGSIDSINQLFDIPNPKGEPQAEVWMGTHPNGCSYVEFSGEKIKLSTLIEQKKTDFLSIQTVEQFGELPYLFKILAANQALSIQVHPSKAEAEEGFARENAQGILINATNRNYKDPNHKPELVYALTNYQAMNGFRPLSDIISLFSALAIDEIASLLSHLKRNQNETGLEHFFTKLLSLCGEKKRRVLEQLLSYARSHAKQPIFALIEELATQYPNDIGLFAPLMLHVLTLQPGEAMFLDARTPHAYLKGTALEIMANSDNVLRAGLTPKHIDVVELAKCTLFKEKSEATLLLTPIQQGDMLSFPVPVADFKFAIFPRPQQANITVSSAEILLPIDCDATLVSPCGTVLTVHKGQSVFIPAYTEKYCLSAAGRVARAYN

SEQ ID NO: 76998 - protein, 90 aa, Vibrio cholerae
MNKTQLIDFIAEKADLTKVQAKAALEATLGAVEGALKDGDQVQLIGFGTFKVNHRSARTGRNPKTGEEIKIAAANVPAFVAGKALKDAIK

SEQ ID NO: 76999 - protein, 445 aa, Vibrio cholerae
MSSNAKKIGLIACTGVVAGNMMGSGIALLPSTLASVGSISIYSWLICIVGALSLAFVFARLATKNPQEGGPIAYAGEVSPVFGFQTGVLYYHANWIGNLAIAITGVSYLSVFFPVLNNPIPAGLATIASVWLFTLVNLLGGSWVSRLCTIGLVLILIPVVGTALFGWTHFDSALYSQNWNVSAGSDGHAVITAVLICLWSFVGVESAAVSSGMVENPKRTVPLATMLGTGLAGLIYVLSTQMISGMFPASEVAASGAPFALATTALFGSWTAPFVSAFTALACFTSLGSWMMLVGEAGKRAANDGNFPKVFGETDRNGVPKKGLLIASSMMTLLMLVLMFFSSETAHASDLFNQLTTDAVLLTMLPYFYSSINLIRFEGMTTRNTFVMLFSGIASLFCMVALAGAEGSTLTATFIMSLIILMFYSKKAGLDKYLETHPQQASAQF

SEQ ID NO: 77000 - protein, 447 aa, Vibrio cholerae
MLDKVVIANRGEIALRILRACKELGIKTVAVHSTADRDLKHVLLADESICIGPAKSIDSYLNIPRIISAAEVTGAVAIHPGYGFLSENADFAEQVERSGFIFVGPRAETIRLMGDKVSAINAMKKAGVPCVPGSDGPLDNDEAKNKAHAKRIGYPVIIKASGGGGGRGMRVVRNEAELTKSIQMTRAEAKAAFNNDMVYMEKFLENPRHVEVQVIADGQGNAIHLAERDCSMQRRHQKVVEEAPAPGITEEMRKFIGERCTRACIEIGYRGAGTFEFLYENGEFYFIEMNTRIQVEHPVTEMITGVDLIKEQLRIAAGQPLSFKQEDIKIRGHAVECRINAEDPERFLPCPGKIERFHAPGGMGVRWESHIYSGYTVPAHYDSMIGKLITYGENRDVAIARMRNALNEMIVEGIKTNIPLQQAIMADENFQKGGTNIHYLEKKLGIK

SEQ ID NO: 77001 - protein, 196 aa, Vibrio cholerae
MRFRCPRLRIRFVCCNPSIAGQAIKTLCGPFGLSYSQDKRERNMDIRKIKKLIELVEESGIAELEISEGEESVRISRYGQPAPAPQVHYAAAPAPVAAPAPVAQAAAVAEAPAAAKVPAGHKVLSPMVGTFYRSPSPDAKAFIEVGQSVSVGDTLCIVEAMKMMNQIEADKSGVVTAILVEDGQTVEFDQPLVVIE

SEQ ID NO: 77002 - protein, 666 aa, Vibrio cholerae
MKRALSGNLPNSQGEPVMSEAHIYPVKQNIKAHTHADNDTYLAMYQQSIKDPEGFWSEHGKIVDWIKPFTKVKHTSFDPGHIDIRWFEDGTLNVSANCIDRHLATRGDQVAIIWEGDDPTQDKTLTYKQLHQEVCRFANALKEQGVRKGDVVCIYMPMVPEAAVAMLACTRIGAVHTIVFGGFSPEALAGRIIDSNAKLVITADEGVRGGRAVPLKKNVDEALCNPEVKNISKVMVLKRTGGNVAWHEHRDIWWHEATAKASDNCPPEEMKAEDPLFILYTSGSTGKPKGVLHTTGGYLVYATMTFKYVFDYQPNEVFWCTADVGWITGHSYLVYGPLANGAKTILFEGVPNYPTTARMSEVVDKHKVNILYTAPTAIRALMAKGDEAIKGTSRDSLRIMGSVGEPINPEAWEWYYRTIGNEKSPIVDTWWQTETGGILITPLPGATALKPGSATRPFFGVQPALVDNMGEIVEGATEGNLVLLDSWPGQMRTVYGDHDRFEQTYFSTFKGMYFTGDGARRDEDGYYWITGRVDDVLNVSGHRMGTAEIESALVAFNKIAEAAVVGVPHDIKGQAIYAYITLNDGVYPSAELHKEVKDWVRKEIGAIATPDVLHWTDALPKTRSGKIMRRILRKIATGDTSNLGDTSTLADPSVVDRLIAEKAQLK

SEQ ID NO: 77003 - protein, 419 aa, Vibrio cholerae
MNLTELKNTPVSDLVKLGESLGLENLARLRKQDIIFAILKAHAKSGEDIFGDGVLEILQDGFGFLRSADSSYLAGPDDIYVSPSQIRRFNLRTGDSIAGKIRPPKEGERYFALLKVNTVNDDRPDNARNKILFENLTPLHANERMVMERGNGSTEDITARVLDLAAPIGKGQRGLIVAPPKAGKTMLLQNIAQSIASNHPECVLMVLLIDERPEEVTEMQRLVKGEVVASTFDEPASRHVQVAEMVIEKAKRLVEHKKDVVILLDSITRLARAYNTVVPASGKVLTGGVDANALHRPKRFFGAARNVEEGGSLTIIATALVDTGSKMDEVIYEEFKGTGNMELHLNRKIAEKRVFPAIDFNRSGTRREELLTKTDELQKMWILRKIVHPMGETDAMEFLIDKLAMTKTNDEFFDAMRRQ

SEQ ID NO: 77004 - protein, 236 aa, Vibrio cholerae
MIIQCQVKSVQPLATHTYQILLQPEHAVAYQAGQYLMVVMGEKDKRPFSLASSPCRSNGELELHIGAADHSAFAHQVVEKFQQAHLNQTWVEVDVPHGNAALQESERPLLLIAGGTGFSYVRSILDHCLSQGKTQPIYLYWGARDAAQLYALNELQELAKQHAHLQVVPVVEQAQDDWAGKVGNVLQAINNDFASLEAFDIYIAGRFEMAGAAREQFTQNKQARRDRMFADAYAFI

SEQ ID NO: 77005 - protein, 357 aa, Vibrio cholerae
MASLSYPKTTMQIQLGANLKPYHTFGIEQLAAQLVVAESIDDLKALYCSAEWASLPKLIIGKGSNMLFTCHYTGMIVVNRLNGIEHQQDDDYHRLHVAGGEDWPSLVSWCVEQGIGGLENLALIPGCAGSAPIQNIGAYGVEFKDVCDYVEYLCLETGTVKRLTMEECQFGYRDSIFKHQLYQKAVVTAVGLKFAKAWQPIIQYGPLKDLSSDCAIHDVYQRVCATRMEKLPDPAVMGNAGSFFKNPVISQQAFARLQIEHPDVVAYPAEQGVKVAAGWLIDQAGLKGHQIGGAKVHPKQALVIVNTGDASAQDVLMLAADIQQRVFNCYGIELEHEVRFIGESEETNLKQWMSEQA

SEQ ID NO: 77006 - protein, 394 aa, Vibrio cholerae
MSKEKFERTKPHVNVGTIGHVDHGKTTLTAAICTVLAKVYGGKARDFASIDNAPEERERGITINTSHVEYDTPNRHYAHVDCPGHADYVKNMITGAAQMDGGILVVAATDGRMPQTREHILLGRQVGIPYIIVFMNKCDMVDDEELLELVEMEVRELLSEYDFPGDDLPVIQGSALGALNGEAQWEAKIVELAEALDTYIPEPERAVDMAFLMPIEDVFSIQGRGTVVTGRIERGILKVGDEVAIVGIKETVKTTCTGVEMFRKLLDEGRAGENVGALLRGTKREEVERGQVLAKPGSITPHTKFESEVYVLSKDEGGRHTPFFKGYRPQFYFRTTDVTGSIELPEGVEMVMPGDNVKMVVDLIAPIAMDEGLRFAIREGGRTVGAGVVAKIIA

SEQ ID NO: 77007 - protein, 182 aa, Vibrio cholerae
MSEAPKKRWYVVQAFSGFEGRVAQSLREHIKMHGMEELFGEVLVPTEEVVEMRAGQRRKSERKFFPGYVLVQMIMNDESWHLVRSVPRVMGFIGGTSDRPAPITDKEADAILNRLEKASEAPRPKTMFEAGEVVRVNDGPFADFNGTVEEVDYEKSRLKVSVSIFGRATPVELEFGQVEKLD

SEQ ID NO: 77008 - protein, 142 aa, Vibrio cholerae
MAKKVEAYVKLQVAAGMANPSPPVGPALGQRGVNIMEFCKAFNARTESLEKGLPIPVVITVYSDRSFTFETKTPPASVLLKKAAGIKSGSARPNTAKVGTITDAQIQEIAATKAADMTGADIEAMKRSIAGTARSMGLVVEG

SEQ ID NO: 77009 - protein, 233 aa, Vibrio cholerae
MAKLTKRMRTIRAKVDVTKEYDINEAVALLKELATAKFVESVDVAVNLGIDARKSDQNVRGATVLPHGTGRDIRVAVFTQGANAEAAKAAGAELVGMEDLADLVKKGEMNFDVVIASPDAMRVVGQLGTILGPRGLMPNPKVGTVTPNVAEAVKNAKAGQVRYRNDKNGIIHTTIGKVTFEADQLKENLEALLVALKKAKPSSAKGVFVKKVSISTTMGAGVAVDQNTLSAQV

SEQ ID NO: 77010 - protein, 162 aa, Vibrio cholerae
MALNLQDKKAIVAEVNEAASGALSAVVADSRGVQVAAMTNLRKQAREAGVYLKVVRNTLARRAVEGTAYECLKDVFVGPTLIGFSNEHPGAAARLFKDFAKENKAFEIKAAAFEGVLTDPEVLATLPTYDEAIARLMMCMKEASAGKLVRTIAAVRDQKEAA

SEQ ID NO: 77011 - protein, 121 aa, Vibrio cholerae
MSITNEQILDAIAEMSVMQVVELISAMEEKFGVSAAAAVVSGPAAAAAVEEQTEFNVILAAAGANKVAVIKAVRGATGLGLKEAKALVDGAPASVKEAVSKEEAEALKKELEEAGATVEVK

SEQ ID NO: 77012 - protein, 1375 aa, Vibrio cholerae
MNSHYSKQRLVTVLTLFNLKGGQFGSLISELRNPMVYSYTEKKRIRKDFGTRPQVLDIPYLLSIQLDSFEKFIEQDPEGQYGLEAAFRSVFPIQSYNGNSELQYVSYRLGEPVFDVKECQIRGVTYSKPLRVKLRLVIFDKDAPAGTVKDIKEQEVYMGEIPLMTENGTFVINGTERVIVSQLHRSPGVFFDSDKGKTHSSGKVLYNARIIPYRGSWLDFEFDPKDNLYVRIDRRRKLPASIILRALGKTSAEILDIFFEKVNFEVKDQTLMMELVPERLRGETATFDIEADGKVYVEKGRRVTARHIRQLEKDGVNFIEVPVEYIVGKVSAKDYVNEATGELIITANQEISLEALANLSQAGYKKLEVLFTNDLDHGPFMSETLRVDSTTDRISALVEIYRMMRPGEPPTKEAAESLFESLFFSAERYDLSTVGRMKFNSSIGREDAEEQGTLDEVDIIEVMKKLISIRNGKGEVDDIDHLGNRRIRSVGEMAENQFRVGLVRVERAVKERLSLGDLDNVMPQDLINAKPISAAVKEFFGSSQLSQFMDQNNPLSEVTHKRRISALGPGGLTRERAGFEVRDVHVTHYGRLCPIETPEGPNIGLINSLSAFARCNEYGFLETPYRRVVNGVVTDEVDYLSAIEEGQFVIAQANAKLTEEGGFADELVTARQKGESGLHPREHVDYMDVATNQVVSIAASLIPFLEHDDANRALMGANMQRQAVPTLRSEKPLVGTGIERNVAVDSGVTAVAKRGGVIQSVDASRIVVKVNEEELIPGEAGIDIYNLTKYTRSNQNTCINQRPCVMPGEPVARGDVLADGPSTDLGELALGQNMRIAFMPWNGYNFEDSILVSERVVQDDRFTTIHIQELSCVARDTKLGAEEITADIPNVGEAALSKLDESGIVYIGAEVKGGDILVGKVTPKGETQLTPEEKLLRAIFGEKASDVKDTSLRVPNSVAGTVIDVQVFTRDGVEKDKRALEIEQMQLKEAKKDLTEEFQILEGGLLARVRSVLLAGGYTEAKLGSIERKKWLEQTLENEELQNQLEQLAEQYDELKADFDKKFEAKRRKITQGDDLAPGVLKIVKVYLAVKRRIQPGDKMAGRHGNKGVISKINPVEDMPYDENGQPVDIVLNPLGVPSRMNIGQILEVHLGLAAKGIGDKINQMIKEQQELAKLREFLQKVYDLGDTRQRVDISELSDEDVRTLAHNLRAGLPVATPVFDGAPESSIKAMLELADLPASGQLTLFDGRTGDAFERPVTVGYMYMLKLNHLVDDKMHARSTGSYSLVTQQPLGGKAQFGGQRFGEMEVWALEAYGAAYTLQEMLTVKSDDVNGRTKMYKNIVDGNHAMEPGMPESFNVLLKEIRSLGINIELEDE

SEQ ID NO: 77013 - protein, 1401 aa, Vibrio cholerae
MKDLLNFLKAQHKTEEFDAIKIGLASPDMIRSWSFGEVKKPETINYRTFKPERDGLFCARIFGPVKDYECLCGKYKRLKHRGVICEKCGVEVTQTKVRRDRMGHIELASPVAHIWFLKSLPSRIGLLMDMPLRDIERVLYFEMYVVTEPGMTDLERGQMLTEEEYLDRLEEWGDEFTAKMGAEAIKDLLASMDLPAEAEQMREELDTTNSETKRKKLTKRLKLVEAFVASGNKPEWMILTVLPVLPPDLRPLVPLDGGRFATSDLNDLYRRVINRNNRLKRLLELAAPDIIVRNEKRMLQESVDALLDNGRRGRAITGSNKRPLKSLADMIKGKQGRFRQNLLGKRVDYSGRSVITVGPYLRLHQCGLPKKMALELFKPFIYSKLETRGLATTIKAAKKMVEREEAVVWDILDEVIREHPVLLNRAPTLHRLGIQAFEPVLIEGKAIQLHPLVCAAYNADFDGDQMAVHVPLTLEAQLEARTLMMSTNNILSPASGDPIIVPSQDVVLGLYYMTREKINAKGEGMYLTGPAEAEKAYRTKTAELHARVKVRITETIKHENGKLTTETKMIDTTVGRAMLWQIVPKGLPYSLVNQKLGKKQISNLLNEAYRKLGLKDTVIFADQIMYTGFAYAALSGVSVGIDDMVVPAAKYTEIAEAEEEVREIQEQFQSGLVTAGERYNKVIDIWASTNDRVAKAMMENLSSEQVINRQGEQEKQESFNSIYMMADSGARGSAAQIRQLAGMRGLMARPDGSIIETPITANFKEGLNVLQYFISTHGARKGLADTALKTANSGYLTRRLVDVAQDVVVTEHDCGTLEGVVMTPHIEGGDVKVALTELALGRVVSEDILKPGTDEVLIPRNTLLDEKWCKVINDNSVDQIKVRSVVTCDSDFGCCAQCYGRDLARGHLVNQGEAVGVIAAQSIGEPGTQLTMRTFHIGGAASTAAAENSIQAKNNGSVKLHNAKFVTNKDGKLVITSRASELTIIDEFGRTKEKHKLPYGSMLSKADGDAVAAGETVANWEAHTMPIITEVAGRVQFVDMIDGVTVSRQTDDLTGLSSSEVTEAAARPAAGKDMRPAIKLVDANGKDVLIPGTDMPAQYFLPGKAIVNLDDGAEVNVGDTLARIPQKSGGNKDITGGLPRVADLFEARKPKEPAILAEHSGTVSFGKETKGKRRLIITRDSGDTYEEMIPKHRQLNVFEGERIERGDVIADGPESPHDILRLRGIHAVTTYIANEVQEVYRLQGVKINDKHIETIVRQMLRKCTITFAGDSEFLPGETVEYSQVKIANRKLVEEGKEPARFERELLGITKASLATESFISAASFQETTRVLTEAAVSGKRDDLRGLKENVIVGRLIPAGTGFAYHQDRQAKRAQEQQGPSAEQATDNLAALLNAGFSSDDE

SEQ ID NO: 77014 - protein, 581 aa, Vibrio cholerae
MRPFESVGVMLNVSRFVFLLFGFVLLAIAPQTWANVLEGVRVWPSPDETRVVLDVKSEVDYSYFTLSSPERLVVDLKQSTSRAKLPVNVTESGILSKVRASSPPEKSTFRLVFELKQKTTPTLFKLAPTPGGQYGHRLVIDMPHGKVSESSSASTPSSPAQVSKDASQLLGNDDIVVAIDAGHGGEDPGSIGPTRKYEKDITLSVSKKLADQLNAVPGMKAVLTRRGDYFVNLNKRTEIARRSKAHLLVSVHADAFHTPQPRGGSVFVLNTRRANTEIARWVENHEQQSELLGGAGEVLSKTNNDRNVSQTLLDLQFSHSQKEGYKVATNILREMGKVAHLHKTEPVNASLAVLKSPDIPSVLVETGFISNPSEEKLLIQRSHQDKLARALATAIVQYFEDNPPEGTLFANRGKAQKHKVQRGESIGLIANQYGVSVDALKKANNLKSSTISVGQLLTIPASSAPNPVPVPVMANPVETETITHVVKTGDFLGKLATTYKVSVASIKKENNLKSDTLVLGQKLKITVSLKDKPLRKHKVQRGEFLSKIADQYNVSVDSIRQANQLRTDQLLVGQQLIIPNK

SEQ ID NO: 77015 - protein, 653 aa, Vibrio cholerae
MTIRILPARLANQIAAGEVVERPASVVKELVENSLDAGATRIDIDLEKGGAKLIRIRDNGSGIDKDELGLALSRHATSKIHTLDDLEAIMSLGFRGEALASISSVSRLTLTSRTVAQEEAWSAYSEGRDMAVKLQPAAHPVGTTVEVLDLFFNTPARRKFLRTEKTEFTHIDELLKRIALSRFDVSFTLRHNGKIVRQYRAATTLPQQEKRLAAVCGNPFVQHMLRIELEHQGLKLHGWITTPEGARQQSDLQYCYVNGRMMRDKLINHAIRQSYETSLRVDQFATYVLFIELDPHQVDVNVHPAKHEVRFHQARLVHDFIYQALSSALVQGAQVMAPTINEGAFHLPHCAEEVNPPVVPMIDTTQQERVWQAVQNTPDYPRKAPRDNDRDESDNPQVRERAVSNPWVASPKTASTGKERYGSASVSKKEAAVYQTLMQTPDLSDEEPSTASTIVSSIEAVKANIAIEKLGKAIQVVAGQYLLMSSPQGCVLISLYQAQQLKLRGLLNAQHGALKAQPLLVPLALKLNESEWQVAQRHSSALLQLGIELKSRTNHSIMVMAVPQPLRQQNLQQLLPDLLSYAASCSESQALSHQALADWLTQRIVVEKRDYTLAEAIGLIAELEQLWQGNLPLQDPHFITLVDFSASITALHS

SEQ ID NO: 77016 - protein, 395 aa, Vibrio cholerae
MAWNEPGNNNGNNGRDNDPWGNNNRGNKGGRDQGPPDLDEVFNKLSQKLGGKFGGKGGKGPSFSGGGAIGFGVIAAIAVAVWFFTGFYTIGEAERGVVLRLGKYDRIVDPGLNWRPRFIDEVTPVNVQAIRSLRASGLMLTKDENVVTVSMDVQYRIADPYKYLYRVTNADDSLRQATDSALRAVVGDSLMDSILTSGRQQIRQSTQQTLNQVIDSYDMGLMIVDVNFQSARPPEQVKDAFDDAIAAREDEERFIREAEAYKNEILPKATGRAERLKKEAQGYNERTINEALGQVAQFEKLLPEYQAAPKVTRDRLYLDAMEQVYSNTSKVLIDSESSGNLLYLPIDKLAGQDNKTAQPRPNKSSSAYDQIELESQTTETNTDTQSRSTTRQGRY

SEQ ID NO: 77017 - protein, 91 aa, Vibrio cholerae
MLHIVKHLEKLPLLSAYLLDGDVVLLTENAVYAAAVHSPYQASINDQNLWLVLYEDLHARGWLEKCDPRISVVTMSDFVDLTVTHDKSITW

SEQ ID NO: 77018 - protein, 124 aa, Vibrio cholerae
MATINQLVRKPRAKQVVKSNVPALAACPQKRGVCTRVYTTTPKKPNSALRKVCRVRLTNGFEVTSYIGGEGHNLQEHSVVLIRGGRVKDLPGVRYHTVRGALDCAGVNDRKQARSKYGVKRPKS

SEQ ID NO: 77019 - protein, 156 aa, Vibrio cholerae
MPRRRVIGQRKILPDPKFKSELLAKFVNILMVDGKKSTAEKIVYTALDTMAEKSGKDHLAVFEEALENVRPAVEVKSRRVGGSTYQVPVEVRPVRRNALAMRWLVEAARKRGEKSMAARLAAEMLDAAENKGSAVKKREDVHRMAEANKAFAHYRW

SEQ ID NO: 77020 - protein, 698 aa, Vibrio cholerae
MARKTPIERYRNIGICAHVDAGKTTTTERILFYTGLSHKIGEVHDGAATMDWMVQEQERGITITSAATTTFWRGMEAQFQEHRINIIDTPGHVDFTIEVERSLRVLDGAVVVFCGTSGVEPQSETVWRQADKYGVPRMVFVNKMDRAGADFLRVVGQIKHRLGANPVPIQLNIGAEEEFKGVIDLIKMKAINWNEADQGMSFTYEEIPADMLELAQEWRNHLVEAAAEASEELMEKYLEDGELSEVEIKQALRQRTINNEIVLAACGSAFKNKGVQAVLDAVIEFLPSPTDVPAIKGIDDRENSVERHADDNEPFSSLAFKIATDPFVGSLTFIRVYSGVVNSGDAVYNSVKQKKERFGRIVQMHANKRDEIKEIRAGDIAAAIGLKDVTTGDTLCDPNHVVILERMEFPEPVIQIAVEPRSKADQEKMGIALGKLAAEDPSFRVETDAETGQTLISGMGELHLDIIVDRMKREFGVDCNVGKPQVAYRETIRGKSEVEGKFVRQSGGRGQYGHVWLKIEPAEPGQGFVFVDAIAGGVIPKEFINPVAKGIEEQMNNGVLAGYPVLDVKATLFDGSFHDVDSSEMAFKIAGSMAFKKGALEAQPVLLEPLMKVEITTPEDWMGDVVGDLNRRRGIIEGMDEGPAGLKIIHAKVPLSEMFGYATDLRSATQGRASYSMEFAEYADVPKNIADAIIAEHG

SEQ ID NO: 77021 - protein, 394 aa, Vibrio cholerae
MSKEKFERTKPHVNVGTIGHVDHGKTTLTAAICTVLAKVYGGKARDFASIDNAPEERERGITINTSHVEYDTPNRHYAHVDCPGHADYVKNMITGAAQMDGGILVVAATDGPMPQTREHILLGRQVGIPYIIVFMNKCDMVDDEELLELVEMEVRELLSEYDFPGDDLPVIQGSALGALNGEAQWEAKIVELAEALDTYIPEPERAVDMAFLMPIEDVFSIQGRGTVVTGRIERGILKVGDEVAIVGIKETVKTTCTGVEMFRKLLDEGRAGENVGALLRGTKREEVERGQVLAKPGSITPHTKFESEVYVLSKDEGGRHTPFFKGYRPQFYFRTTDVTGSIELPEGVEMVMPGDNVKMVVDLIAPIAMDEGLRFAIREGGRTVGAGVVAKIIA

SEQ ID NO: 77022 - protein, 122 aa, Vibrio cholerae
MRHYEIVFMVHPDQSEQVAGMIERYTGSITEAGGKIHRLEDWGRRQLAYPINKLHKAHYVLMNVEADQAVVDELETAFRFNDAVLRNMIMRTKAAITEPSIMLKAREERVKRDEMKFDADVE

SEQ ID NO: 77023 - protein, 100 aa, Vibrio cholerae
MTNRIELSGVVAKALVRSQSPSGVKHCHFWLEHRSTMVEADLPRQVFCRLPVVVSGARSEALTQNLVQGSSILVSGFLAYQTSRNGVGKLVLHADKISQI

SEQ ID NO: 77024 - protein, 75 aa, Vibrio cholerae
MARFFRRRKFCRFTAEGVQEIDYKDVATLKNYITEAGKIVPSRITGTSAKYQRQLARAIKRARYLALLPYTDKHQ

SEQ ID NO: 77025 - protein, 149 aa, Vibrio cholerae
MQVILLDKIGNLGSLGDTVNVKSGYARNFLIPQGKAVMATKANVAMFESRRAELEAKVAEQLAAAQTRADQVNALEAVVIASKAGDEGKLFGSIGTRDIADAITAAGVKVSKSEVRLPEGALRNVGAYEVSVQLHSEVFATAKVQVVAE

SEQ ID NO: 77026 - protein, 468 aa, Vibrio cholerae
MADPRTDNRNRKIPDAQVDAIKVPPHSLEAEQSVIGGLLLDNERWDTVSEHVMTQDFYSRPHRLIFDGVKSILEAGKPLDLITLSEYLEQREQLEDVGGFAYLADLAKNTPSAANINAYAEIVAERALVRNLIGVANEIADAGYDPQGRNAEDLLDLAESKVFAIAEARTSENEGPKNVDSILERTLERIELLYKTPQDGVTGVNTGFTDLNKKTAGLQGSDLIIVAARPSMGKTTFAMNLCENAAMEQDKPVLIFSLEMPAEQIMMRMLASLSRVDQTKIRTGQLDDEDWARISSTMGILMEKKNMYIDDSSGLTPTEVRSRARRIAREHGGLSLIMVDYLQLMRVPALTDNRTLEIAEISRSLKALAKELNVPVVALSQLNRSLEQRADKRPVNSDLRESGSIEQDADLIMFIYRDEVYHPDSPLKGTAEIIIGKQRNGPIGSVRLTFQGHYSRFDNYAGPAFDDE

SEQ ID NO: 77027 - protein, 375 aa, Vibrio cholerae
MLDLHLTMSNSMNYMKAATAYINLEALQHNLQRVKQQAPESKIMAVVKANGYGHGLRHIARHALGADAFGVARIEEALQLRASGVVKPILLLEGFYSPGDLPVLVTNNIQTVVHCEEQLQALEQAQLETPVMVWLKVDSGMHRLGVRPEQYQDFVARLHQCENVAKPLRYMSHFGCADELDKSTTVEQTELFLSLTQGCQGERSLAASAGLLAWPQSQLEWVRPGIIMYGVSPFVEKSAVQLGYQPVMTLKSHLIAVREVKAGESVGYGGTWTSQRDTKIGVIAIGYGDGYPRTAPNGTPVVVNGRRVPIAGRVSMDMLTVDLGPDACDRVGDEAMLWGNELPVEEVAAHIGTIGYELVTKLTSRVEMSYYGAGV

SEQ ID NO: 77028 - protein, 550 aa, Vibrio cholerae
MLKNINPTQTQAWKALTAHFESAQDMDLKALFAQDSERFAKYSARFGQDILVDYSKNLVNAETMQHLFALAKETDLQSAITAMFKGEAINQTEDRAVLHTALRNRSNSPVLVNGEDVMPAVNAVLAKMKAFSERVIGGEWKGFTGKAITDVVNIGIGGSDLGPYMVTEALVPYKNHLTMHFVSNVDGTHMAETLKNVDPETTLFLVASKTFTTQETMTNAHTARDWFLKAAGDEAHVAKHFAALSTNGKAVAEFGIDTDNMFEFWDWVGGRYSLWSAIGLSIILSIGYDNFVELLAGAHEMDQHFVNTPFESNIPVILALIGIWYNNFHGAESEAILPYDQYLHRFAAYFQQGNMESNGKYVDRNGNPVTYQTGPIIWGEPGTNGQHAFYQLIHQGTKLIPCDFIAPAVSHNLVGDHHQKLMSNFFAQTEALAFGKSAQAVQAELEKAGKSAAEIAALVPFKVFEGNRPTNSILVKQITPRTLGNLIAMYEHKIFVQGVIWNIFSFDQWGVELGKQLANQILPELADSAAVTSHDSSTNGLINAFKAFRA

SEQ ID NO: 77029 - protein, 327 aa, Vibrio cholerae
MTHSCRLSVAPMLDWTDRHCRYFHRLLSAQTLLYTEMVTTGAIIHGRGDFLAYNQEEHPVALQFGGSNPKDLAHCAKLAQERGYDEINLNVGCPSDRVQNGRFGACLMGEPDLVAECVAAMRAVVDIPVTVKTRIGIDDQDSYEFLTQFIATVAEKGGCEQFTIHARKAWLSGLSPKENREIPPLDYPRAYQIKRDFPHLTIAVNGGVKSLEEAKLHLQHLDGVMIGREAYQNPYLLAEVDQQIFGLETPVKKRSQVIHEMMPYIERELSQGTHLGHMTRHMLGLFQNMPGARQWRRHISENAHKPGAGLEVVEQALAKIPYQELGV

SEQ ID NO: 77030 - protein, 444 aa, Vibrio cholerae
MSVYYTLCFLSAAAMLIAFINSKISRMQTTIAITAGSMMLSLLILIAGQNDWFHLNQIATETVTSINFENFLLKGILGFLLFAGGLGIKLPNLKDQKWEITVLALGATLFSTFFIGFTLYGFCQLIGIQFDLVYCLLFGALISPTDPIAVLAIVKKLKAPKRISTQIEGESLFNDGFGLVIFVTIFTIAFGHETPTVGSVTLLFIQEAIGGIVYGFLLGLLFHYLISATDDHSMELLLTIGIPTAGYAFADVIHVSGPLAMVVSGIMIGNWTRFIGFSKESEEHLDHFWELVDEFLNGVLFLLIGMSMLLFEFHQEDWILMAFAVPLVLCGRYLSVFVSYIGFKRYRSYNPWSIRILTWGGLRGGLALAMALSIPSGIMVIPEKLIDVKELILVMTYAVVVFSILVQGSTITPMIEKAKKAEKALQAERNTDNQSPMPQQEQQH

SEQ ID NO: 77031 - protein, 1226 aa, Vibrio cholerae
MGKEVRQQLEQQLKQRILLIDGGMGTMIQSYKLQEEDYRGARFVDWHCDLKGNNDLLVLTQPQIIKEIHSAYLEAGADILETNTFNSTTIAMADYDMQSLSAEINFAAAKLAREVADEWTAKDPSRPRYVAGVLGPTNRTCSISPDVNDPGFRNVTFDGLVEAYSESTRALIKGGSDLILIETIFDTLNAKACAFAVDSVFEELGISLPVMISGTITDASGRTLSGQTTEAFYNALRHVRPISFGLNCALGPDELRQYVEELSRISECYVSAHPNAGLPNAFGEYDLSAEEMAEHIAEWAQAGFLNLVGGCCGTTPEHIAAIAKAVEGVKPRALPDLKVECRLSGLEPLNIGPETLFVNVGERTNVTGSARFKRLIKEEQYDEALDVAREQVENGAQIIDINMDEGMLDAEACMVRFLNLCASEPEISKVPVMVDSSKWEVIEAGLKCIQGKGIVNSISLKEGKEKFIAQAKLVRRYGAAVIVMAFDEVGQADTRERKLEICRRAYHILVDEVGFPPEDIIFDPNIFAVATGIDEHNNYALDFINAVADIKRELPHAMISGGVSNVSFSFRGNNYVREAIHAVFLYHCFKHGMDMGIVNAGQLEIYDNVPLKLREAVEDVILNRRSDGTERLLEIAEAYRENSVGKEEDASALEWRAWPVAKRLEHALVKGITEFIVQDTEEARQQASKPLEVIEGPLMDGMNVVGDLFGEGKMFLPQVVKSARVMKQAVAYLEPFINAQKSGSTSNGKILLATVKGDVHDIGKNIVGVVLQCNNFEIIDLGVMVPCEQILKVAREQNVDIIGLSGLITPSLDEMVHVAKEMERQGFELPLLIGGATTSKAHTAVKIEQNYHAPVVYVNNASRAVGVCTSLLSDEQRPGFIERLDLDYERTRDQHARKTPKSRPVTLEQARANKAALDWANYTPPAPAKPGVHVFENIALATLRPYIDWTPFFMTWSLMGKYPAILEHEEVGEEAKRLFHDANALLDKVEREGLLKASGMCALFPAASVGDDIEVYSDESRTQVAHVLYNLRQQTEKPKGANYCLSDYVAPKESGKRDWIGAFAVTGGIGERALADAYKAQGDDYNAIMIQAVADRLAEAFAEYLHEKVRKEIWGYASDENLSNDDLIRERYQGIRPAPGYPACPEHTEKATLWQMLNVEETIGMSLTTSYAMWPGASVSGWYFSHPDSRYFAVAQIQPDQLHSYAERKGWRLEEAEKWLAPNLDA

SEQ ID NO: 77032 - protein, 372 aa, Vibrio cholerae
MTIRSFIPPHRILMGPGPSAISPQVLQALSRPTVGHLDPLFIGMMDELKQLLKYAFQTENEFTIAVSAPGSAGMEACFVNLVEPGDKVIVCRNGVFGERMRDNAVRCGAEVVVVDDEWGCPVSVEKVQATIDEHPDAKILAFVQAETSTGALSDAQALGALAKQHGLLTIVDAVTSLGGVPLLVDEWQLDAVYSGSQKCLSCVPGLAPLTFSPRAIEKIQSRKTPIQSWFLDQSLVLGYWSGAGKRSYHHTAPVNSLYALHEALLLLQQEGLEHAWQRHRLMHEKLKQGLEQLGFQFVVAEPYRLPQLNAIYVPEGIEEAKVRSHLLNEYNLEIGAGLGALAGKAWRIGVMGYGARSENIALCLRALEESLR

SEQ ID NO: 77033 - protein, 940 aa, Vibrio cholerae
MDKIEVRGARTHNLKNINLTIPRDKLIVITGLSGSGKSSLAFDTLYAEGQRRYVESLSAYARQFLSLMEKPDVDHIEGLSPAISIEQKSTSHNPRSTVGTITEVYDYLRLLYARVGEPRCPEHQVPLKAQTISQMVDKVLELPEGSKMMLLATIVKERKGEHVKTLENLAAQGFIRARIDGETCDLTDPPKLELHKKHTIEVIVDRFKVRSDLQQRLAESFETALELSGGIVVVAPMEGDGEEQIFSANFACPHCGYSMRELEPRLFSFNNPAGACPTCDGLGVQQYFDPDRVIQDANLSLAQGAIRGWDQKNFYYFQMLTALAEHYDFDVHTPFNKLSKKIQEIILHGSGRTEIEFKYINDRGDIRLKKHPFEGILHNLERRYRDTESNSVREELAKYISNKPCSSCDGTRLKIEARNVFINDTALPTIVELSIADALTFFQELKLEGQRAQIAEKVMKEINDRLQFLVNVGLNYLNLSRSAETLSGGEAQRIRLASQIGAGLVGVMYVLDEPSIGLHQRDNERLLQTLTHLRNLGNTVLVVEHDEDAIRMADHVIDIGPGAGVHGGMVVAEGNVEEIIANPNSLTGQYLSGVKKIAVPEQRTPKDAKKTVELKGAVGNNLKNVDLSIPVGLFTCVTGVSGSGKSTLINDTFFKIAHTALNGATTATPAPYRSIQGLEHFDKVIDIDQSPIGRTPRSNPATYTGIFTPIRELFAGTQESRSRGYQPGRFSFNVRGGRCEACQGDGVIKVEMHFLPDVYVPCDVCKGKRYNRETLEVRYKGKTIDEVLDMTVEDAREFFDPVPVIARKLQTLMDVGLSYIRLGQSATTLSGGEAQRVKLARELSKRDTGKTLYILDEPTTGLHFHDIQQLLSVLHRLRDHGNTVVVIEHNLDVIKTADWIIDLGPEGGQGGGLIIAEGTPEDVAQIEASHTARFLKPLLN

SEQ ID NO: 77034 - protein, 291 aa, Vibrio cholerae
MMIKKCLFPAAGYGTRFLPATKSMPKEMMPVVNKPLIEYGVDEAIQAGITGMCIVTGRGKHSIMDHFDMNYELEHQIRGTNKEELLGDIRKIIESANFTFIRQREMKGLGHAILTGKELVGDEPFAVVLADDLCVNEEQGVLAQMVALYKQFRCSIVAVQEVPENETHKYGVIAGEMIKDDLFRVDNMVEKPEPGTAPSNLAIIGRYILTPDIFDLIEQTEPGKGGEIQITDALLKQAKAGCVLAYKFKGKRFDCGSVEGYIEATNFCYENMYKKNDQKVELAKKSTHKGQ

SEQ ID NO: 77035 - protein, 177 aa, Vibrio cholerae
MASRGVNKVILIGNLGQDPEVRYMPSGGAVANITIATSETWRDKATGEQKEKTEWHRVTLYGKLAEVAGEYLRKGSQVYIEGQLQTRKWQDQSGQDRYSTEVVVQGYNGIMQMLGGRAQQGGMPAQGGMNVPAQQGSWGQPQQPAKQHQPMQQSAPQQYSQPQYNEPPMDFDDDIPF

SEQ ID NO: 77036 - protein, 673 aa, Vibrio cholerae
MAQMRYTPTLKLSTRLVAFVTMTVISAMFILFLGGTLSFQRLGQEYLNHYLQGIVEVVDKEMEDPDAAYSMQRWMPKMLQASGIIEMQLTSEAGPIYRFKDTTNTIEASRLHQVALPLKRNPGYVMHFKAVPPYLNYNYSLQAMWSTTLAVLLIVFFLIRGLKWLKEQLLGSELLEERGRMILAGRVEQHAKGDPREWPFTASEALDRLIEELQDARQERSRFDTFIRSQTFLDQLTGTANRVLYDSKLESALLESGAHGGVMMLRVDDLESAREESPKRTLDEFIIEVGECLSNIVQRYPDAILSRYYEDVFALFIPHQGSKDIAQVATQAIKLIERINPPEPLPEDNWFHIGVTMYQEGERRGRIIDEMETALKSAQLQGVNAWSRFQKPKQLQEDRGSVRWRTLFEQVLRPEEILLYRQACYRISANGEREFLHYELFARIQDPQQGILKASRFSSALKRSAMKPCWDRAVFSSVVSFLKRSELVEPLSVNLHVVPFNDKRYARWIRNELMQMPFSLRTALSFEFSEAHLVNHLDYMRPIIRMLAGLGCKIVVGQAGRTIVSTHYIKDLKVNYLKLHRSLIKKIDQRHENQLFVRSLVGVCGGTQAEVVAVGVETTQEWQTLQMLGVSGVQGRLFDEEQQMLPPLPPEPLKRPPRLSVKPIGKRNRWRTK

SEQ ID NO: 77037 - protein, 347 aa, Vibrio cholerae
MFKKLRGMFSNDLSIDLGTANTLIYVKGQGIVLDEPSVVAIRQDKGRGGKTVAAVGHAAKQMLGRTPGNISAIRPMKDGVIADFYVTEKMLQHFIRQVHDNSVLKPSPRVLVCVPCGSTQVERRAIRESALGAGAREVYLIDEPMAAAIGAGLRVSEPTGSMVIDIGGGTTEVAVISLNGVVYSSSVRIGGDRFDEAIINYVRRNYGSLIGEATAEKIKHEIGSAYPGDDVQEIEVRGRNLAEGVPRSFTLNSNEILEALQEPLTGIVSAVMVALEQCPPELASDISENGMVLTGGGALLKDLDRLLMEETGIPVVIADDPLTCVARGGGKALEMIDMHGGDLFSEE

SEQ ID NO: 77038 - protein, 1291 aa, Vibrio cholerae
MISTVTRLGRILMWLLVSLLIVLALAVTALRILLPQMNRFQAEIQHWLNQNSSVQVAIADVQGYWRNTHPSLSLQTLQAHWPDSNDIQLNAASVEIEFDLLQSLWQRQPVVADLTVNGLVLDLRAIDWLALEQNPNPKQSRQGRVVKQLDDLLLRQLDDFTLKNSAILYRTFAGDLRQLDIEKLRWQNQGLRHFAEGVVSIAGININSLLVSANFIDHGSLRDVSGDFYVSADKVRVLPWLTRYLKDQTGIQKGQVSLNAWATLEHNQPKDGYVEFKPSELVWQNGEQTHELLLESGIVELKPTEKGWQVNAHSLRLRSDDELWPLLDVAMDWQPDEWRLNLSQLNIENLLPLAKLIPESQTLNHWLTTLKPKGTLEDVRIAKGATLESLRYSASLIDGGIAQWELLPQVNALQAQIQGSPSKALIKASMVDDVLPYGEVFQAPLNIRQGAVNLVWQQEQYGWSLWSDKVTVATPDLQALGAFRLDFPDDASPFLSFYAEADLFNAGETWRYLPTLALGRELTDYLSTAIQAGQVNTAKLIWYGALDQFPYRMHNGVFQAWVGLKEAKFAFDTAWPPITDLQLDLLFENDAMYLDSRSATLMEVSAERITGRIPELAELGHIEIEAVASAQQGNAIRNYMMATPLVDSVGAALTTIQVKGPVRSEFQLNIPFHSGAEPRAWGFAELSNNAVDIDTPPMSLTSVSGKIEFDNDRVSAAGLDARLLKQPVSIDFKGEDAKRGYAVGIDMVGDWEVKPLIPFVGERWLSRVKGHAPWQASVDIQLNDVGFTYQLDGKADLRGLESRYPFPLKKALKVKGQALLQASGNQEMVSARLQLPQAKYQAEIDLTPKVPVLKATNLVLGQGSFKISPVVGHHVQLRSQAFNLDDWLSILNEKPAPKSRKSKLASLNTPAFPMPERVDAAVKELTFAGLDWHDVDLNARRKDLGWLLNLDSQEIKGQANYIEPYDLSIALERLHLFLPQLEAGEEALLVDLDRQKLPLITDFDRKFHQWMPNLTLTIKDFWLQGYKIGQANVDFQRQGDTLLWKSIDFTSGTNQLHVNGTWTLTDTQSRTQMNLDMKGDNNSDLMARFGINSGIQRAPFEITASTQWDGAPWSMQVNTLQGKVDTKLGKGVISDVSGAARLLGLFSLDSIIRKMQLDFSDVFDKGMAFDSISGSGELSQGIFVTNNIKMDAVAGEMTIKGLADLNTRTVDAEVNFVPDITSGIPVLTAFAVTPQTALYVLAITTVISPVVEVFTQVNYEVKGPLDSPTVKELSRSKGEFKLPEKLRKLTE

SEQ ID NO: 77039 - protein, 145 aa, Vibrio cholerae
MYKHILVPVDLNEQGFADKAVQLAVWHAKHSNAEIHLLNVLPGIHMSMVATYFPKDAAAQMKNDVRAQLKAFAEKHIAEEVVYKLHIAEGKPYATILDYAERLGADLIVMPSHKRSRIDKVMLGSVASKVVENSPINVMVVKPQG

SEQ ID NO: 77040 - protein, 468 aa, Vibrio cholerae
MDKKLGLGSLTALVIGSMIGAGVFSLPQNMAAVASPLAVMIGWSITGIGMIFLALSFQYLAVNKPHVNSGVFGFAREGFGDFAGFCSAWGYWFSAMVANVSYLVIVFSTLGLLFDTPDQIIFGSGNTWWSIGGASLLLWAVHSLVLRGVQTAALINLITTMTKMVPLLLFIVSAIAAFNWSTFSLDFAGLHHISGADLLGQVKATMLITVWVFVGIEGAVVVSSRARQRKDIGRATILGLLTALSIYVLVTLLSMGVIQVNQLAQYPNPSMAQVLTTIIGPWGKYIIAVGLLISVCGAFLSWTVLASEAPFLAAKDKMFPRHFAKQNQAGSPVNALFLTTLCIQVSLILVRYTSSTYDSLLIFASEMILVPYFLVGAFTLKLALEQRDRGKLLLIGFGATAYGLWLLYASGLHYLMLSTLLYVPGFAFYLKAKREQGVKAFCGREMVGASTLLLFAVGAAGMLWQGAW

SEQ ID NO: 77041 - protein, 348 aa, Vibrio cholerae
MIFSVLCSDSRRLNALHALISAGFTMDFKAIQALTANDMAKVNETIHAQLNSDVSLINQLGFYIISGGGKRLRPLLAVLSAKALGYQGSHHTTAAAFIEFIHTATLLHDDVVDESDLRRGKATANAAFGNAASVLVGDFIYTRSFQMMTELGSMKILKLMSDAVNVIAEGEVQQLMNCNDPDTTEASYMQVIYSKTARLFEAATQIGAILCDASPEVELAMQNYGKYLGTAFQLIDDVMDYTSDGDEMGKNVGDDLAEGKPTLPLLYAMQHGNPEQAAMIREAIEKANGMSRLNEILAAMEQTGSLQYTIEKALHEADKAIAELAILPESEYKQALITLAHMAVNRSK

SEQ ID NO: 77042 - protein, 103 aa, Vibrio cholerae
MYAVFQSGGKQHRVSEGQTLRLEKLDVETGATVEFDKVLLVANGEDIKVGAPLVEGGKVVAEVVQHGRGDKVKIVKFRRRKHSRKQQGHRQWFTEVKITGINA

SEQ ID NO: 77043 - protein, 86 aa, Vibrio cholerae
MAHKKAGGSTRNGRDSESKRLGVKRFGGESVLAGNIIVRQRGTKFHAGTNVGIGKDHTLFALSDGKVKFEVKGPNNRKFVSIETAE

SEQ ID NO: 77044 - protein, 395 aa, Vibrio cholerae
MSGGKMKFVDEAVIKVQAGDGGNGVVSFWREKFVTNGGPDGGDGGDGGDVYMVADENLNTLIDYRFQRFYEAERGKNGGGGNCTGKSGKDKELRVPVGTRAVDIHTNEIIGEVAEHGKKVMIAKGGWHGLGNARFKSSVNRSPRQKTLGTKGELRDIRLELLLLADVGMLGMPNAGKSTFIRAVSAAKPKVADYPFTTLVPSLGVVSVLPEKSFVVADIPGLIEGAAEGAGLGIRFLKHLERCRVLLHMIDIMPADQSDPAHNALTIIDELEQYSEKLAKKPRWLVFNKVDLMSEEEADEIIQNIIDALAWEGDYFKISAANRQGTKELCMKLAEFMDTLPREAEEKTEAEKVDFTWDYNHKDGLAGREVITEDDDDWDDWDDEEDDGHVIYVRD

SEQ ID NO: 77045 - protein, 165 aa, Vibrio cholerae
MMISMIAAMADQRIIGKDNQMPWHLPADFAWFKRCTLGKPVVMGRKTYQSIGRPLPGRHNIVISRDASLQIEGVDVVTSIEAALAKAGEVDEVMIIGGGSLYAACLPMAHKLYITEIHAKLDGDTQFPEWGSDWLERSREHYPADEKNAYGMDFVIFERQYPLPT

SEQ ID NO: 77046 - protein, 282 aa, Vibrio cholerae
MIKKRNNLEKTMRNDVHLGHKARKRFGQNFLNDPYIIDGIVSAINPKPGQNLVEIGPGLGAITEPVGREVDKFTVIELDRDLAERLRNHPELASKLTIHEGDAMRFDFKQLVKPNNKLRVFGNLPYNISTPLMFHLFEFHRDIQDMHFMLQKEVVNRLAAGPGTKAYGRLTVMAQYYCKVVPVLEVPPSAFVPPPKVDSAVVRLVPYEDLPHPATSLEWLDRVVREGFNQRRKTVRNCYKGLAEPETLETLGINPGMRPENLTLAQFVALANWLDATHKTHA

SEQ ID NO: 77047 - protein, 541 aa, Vibrio cholerae
MKLKTQAYLLSAIILAALLALTATGLWTLRVASNLDNKARVTELFNSAYSILTEVEKLAQEGKMSEPEAKALATRLMRNNLYKDNEYVYVADENMTFVATPLDPQLHDTSFHDFKDGKGNSVGRLIQDVLRHQSGKLVEYTWTQKQADGSIEEKLSIARKTPHWGWVVGTGIGFNEVNARFWSTAQWQLSLCVVIAVAILSLLLVAIRKILLIIGGEPNEVRSAVQAVAQGRIRREFVIKAPKESIYGAVQQMSSSLADLVAKLEQSMVALRSELAGAGTRAKSIAELTDSQQQSTAMIATAMTEMASSANQVADSARDTAFNTDQADQQSQHTQKLIHNTVSNIQGLATQLQTASTAVADLDLDVKNIAKVLDVIGDIAEQTNLLALNAAIEAARAGEQGRGFAVVADEVRNLAGRTQTSTKEIQQMIHNLQEGSRNAIQTIQICGQTSQSSVQESENAASALALIVSALESVSSMSHQIATAAAEQTQVSDDIARRINMIEESGSKLSRVVMESHNSTQTLTKLARELEQWAAHFEVTR

SEQ ID NO: 77048 - protein, 200 aa, Vibrio cholerae
MKKIVLATGNQGKVREMADLLSDFGFDVVAQSEFNVPEAAETGTTFIENAIIKARHAAQITGLPTIADDSGLEVDYLNGAPGIYSARYAGEHASDGDNLNKLLMAMQDVPDDQRSARFHCVLVLMRHADDPTPIVCHGKWEGKILTAPHGSNGFGYDPIFWVPEENCASAELEPVRKKQLSHRGKALQKLFKAIEEQRTC

SEQ ID NO: 77049 - protein, 236 aa, Vibrio cholerae
MRSIQQNIEHITAQIESAQQKCGRARSSVQLLAVSKTKPVEAILEATQAGQRYFGENYVQEGVDKIRYFAEHHPQLALEWHFIGPLQSNKTRLVAEHFDWVHTIDREKIALRLSEQRPVNMPPLQVLIQVNTSGEASKSGIEPQQLFTLAELISRLPNLTLRGLMSIPENVPDYPAQLAAFTQLAELQQQLAQKYPQIDTLSMGMSGDMQAAIEAGSTIVRIGTAIFGERDYSRNA

SEQ ID NO: 77050 - protein, 345 aa, Vibrio cholerae
MDIAELLEFSVKHNASDLHLSAGVPPMVRIDGEVRKLGVPAFTHSDVHRLIFEIMNDAQRSEYEEKLEVDFSFELPNVGRFRVNAFHQARGCSAVFRTIPTVIPTLEQLDAPEIFSKIANYEKGLVLVTGPTGSGKSTTLAAMVNYVNAHHNKHILTIEDPIEFVHSNNKCLINQREVHRDTHSFKNALRSALREDPDVILVGELRDQETISLALTAAETGHLVFGTLHTSSAAKTIDRIIDVFPGSDKDMVRSMLSESLRAVIAQKLLKRVGGGRVACHEIMLATPAIRNLIREDKVAQMYSIIQTGAAHGMQTMEQNAKQLIARGVVDAQEVQSKIELDLKAF

SEQ ID NO: 77051 - protein, 434 aa, Vibrio cholerae
MPRLLGGRMNSQQLFDDLQQRGLIAQSTPLEALVERFATPQVLYCGFDPTAGSLHIGHLVPLLMLKRFQNAGHQAIALIGGATGMIGDPSFKANERVLNSAQTVQQWVSDLSQQITQLMTSQGENCASLMAVNNADWIGKINLIDFFRDVGKHFSVNAMINRESVKQRLARPDQGISFTEFSYSLLQSYDFAHLNREFGCALQIGGNDQWGNIVSGIDLTRRLNGVEVCGLTLPLITKSDGTKFGKTESGAVWLESSKTSPYRFYQFWLNSDDADVYRFLAYYTFLSTAEIEEIRQADALRAGKPQAQQILAEHVTRFVHGEEGLAAAQRITQALFSGDVSYLSLSELAQLELDGLPCVAASRTDSLLDLLLSSGLASSKRQAREWLENGAIRVNGERVQQEGGLSGFALFDRYYVLQRGKKQFALIKLEGLAE

SEQ ID NO: 77052 - protein, 140 aa, Vibrio cholerae
MSRTVMAFDYGTKSIGSAIGQEITGTASPLKAFKANDGIPNWDEIEKQIKEWQPNLLIVGLPTDLHGKDLDTITPRAKKFAQRLHGRFGLPVELHDERLSTTEARAELFAMGGYKALSKGNVDCQSAVIILESWFESQWG

SEQ ID NO: 77053 - protein, 243 aa, Vibrio cholerae
MRIPRIYHPEPIHQLGTVALSEDAAGHIGRVLRMQAGQEVLLFDGLGAEFPAVISEVGKKQVLVNITERVENSIESPLDLHLGQVISRGDKMEFTIQKSVELGVTTITPLLSERCGVKLDEKRFEKKIQQWQKIAISACEQCGRNTVPEIRPIMDLEAWCAEPTEALKLNLHPRAKYSLNTLPTPVSKVRLLIGPEGGLSAEEIDMTRRYQFEETLLGPRVLRTETAALTAIAALQVRFGDLG

SEQ ID NO: 77054 - protein, 231 aa, Vibrio cholerae
MMIFRFVTTLAASLPLLTFAAPISFSHAKNEAVKIYRDHPVSFYCGCEIRWQGKKGIPDLESCGYQVRKNENRASRIEWEHVVPAWQFGHQLQCWQQGGRKNCTRTSPEFNQMEADLHNLTPAIGEVNGDRSNFSFSQWNGVDGVTYGQCEMQVNFKERTAMPPERARGAIARTYLYMSEQYGLRLSKAQSQLMQAWNNQYPVSEWECVRDQRIEKVQGNSNRFVREQCPN

SEQ ID NO: 77055 - protein, 385 aa, Vibrio cholerae
MAIKHLFTSESVSEGHPDKIADQISDAVLDAIFEQDPKARVACETYVKTGMVMVGGEITTSAWVDIEEITRQTVREIGYVHSDMGFDANSCAVLNTIGKQSPDINQGVDKADPKEQGAGDQGIMFGYATNETEVLMPAPITYAHRLMQRQAAVRKNGTLPWLRPDAKSQVTFQYDQGKIVGIDAVVLSTQHSDSISTADLREAVMEEIIKPVLPAEWLSKETKYFINPTGRFVIGGPMGDCGLTGRKIIVDTYGGAARHGGGAFSGKDPSKVDRSAAYAARYVAKNIVAAGMADRCEIQLSYAIGVADPTSIMVETFGTEKVSQEIIIEAVRQFFDLRPYGLQEMLNLLQPIYKKTAAYGHFGREEFPWEATDKAALLRDFAGLK

SEQ ID NO: 77056 - protein, 694 aa, Vibrio cholerae
MQQQGGFATIAATDFPHPFISLTSHLGVDMSSRKQLANAIRALSMDGVQKANSGHPGAPMGMADIAEVLWRSHLNHNPQNPNWADRDRFVLSNGHGSMLIYSLLHLSGYELSIDDLKNFRQLHSKTPGHPEYGYAPGIETTTGPLGQGITNAVGMAIAEKALAAQFNKPGHDIVDHFTYVFMGDGCLMEGISHEACSLAGTLGLGKLIAFWDDNGISIDGHVEGWFSDDTPKRFEAYGWHVIPAVDGHDADAINAAIEAAKAETSRPTLICTKTIIGFGSPNKAGSHDCHGAPLGNDEIKAAREFLGWEHAPFEIPADIYAAWDAKQAGASKEAAWNEKFAAYAKAYPAEAAEYKRRVAGELPANWEAATSEIIANLQANPANIASRKASQNALEAFGKLLPEFMGGSADLAPSNLTMWSGSKSLTAEDASGNYIHYGVREFGMTAIINGIALHGGFVPYGATFLMFMEYARNAMRMAALMKVQNIQVYTHDSIGLGEDGPTHQPVEQIASLRMTPNMSTWRPCDQVESAVAWKLAIERKDAPSALIFSRQNLAQQPRSAEQVANIAKGGYILKDCAGQPELILIATGSEVELAVAAYEQLSAEGKAVRVVSMPSTDAFDKQDAAYREAVLPAAVTKRIAIEAGIADFWYKYVGFGGRIIGMTSFGESAPAGELFKLFGFTTENVVKQAKELLA

SEQ ID NO: 77057 - protein, 392 aa, Vibrio cholerae
MRGQIMSVIKMIDLDLAGKRVFIRADLNVPVKDGKVTSDARILASLPTIKHCLEAGAKVMVTSHLGRPTEGEYAEEFSLLPVVNYLNDALDCEVRLVKDYLDGVELNAGELVVLENVRFNKGEKKNEEALSKKYAALCDVFVMDAFGTAHRAQASTHGVGMFAPIACAGPLLADELEALGKAMDKPARPMVAIVGGSKVSTKLTVLESLSKIADQLVVGGGIANTFIAAAGHNVGKSLYEADLVETAKKLMEECAIPVATDVACAKAFDENAEAEIKHVSEVQDDDMIFDLGPNSTAELAEILKNAKTILWNGPVGVFEFKNFEAGTRGIAEAIAQSEGFSVAGGGDTLAAIDKFGIKADVSYISTGGGAFLEFVEGKKLPAVEMLEARAKA

SEQ ID NO: 77058 - protein, 358 aa, Vibrio cholerae
MSKIFDFVKPGVISGDDVQKVFEVAKQNGFALPAVNCVGTDSVNGVLEAAAKVKAPVIVQFSNGGAAFFAGKGLKLEGQQAQILGAIAGAKYVHTVAEAYGVPVILHTDHAAKNLLPWIDGLLDAGEKHFAETGKPLFSSHMIDLSEESLEENIEISAKYLERMAKMNMTLEIELGCTGGEEDGVDNSDMDSSELYTSPEDVAYAYEKLNAISHRFTIAASFGNVHGVYKPGNVVLTPTILRDSQKYVSEKFGLPENSLNFVFHGGSGSSLEEIRESISYGVIKMNIDTDTQWATWDGIRQYEAKNHDYLQGQIGNPTGEDAPNKKYYDPRVWLRAGQAAMVARLEKAFSDLNAIDVL

SEQ ID NO: 77059 - protein, 287 aa, Vibrio cholerae
MAGESIGVEVPIVESFNQVNTWLTNNSDLLIQYGVNVISAILILFIGNLVVKGVAGSVANVLKKKEMDKAVVDFIHGLVRYTLFIIVLIAALSRIGVQTASVVAVIGAAGLAVGLALQGSLSNFAAGVLIVAFRPFKSGDYVEIGGVAGSVDSIQIFQTVLKSPDNKMVVVPNSAVIGGAITNYSRHETRRVDMVIGVSYKSDLQKTKRVLRETLEKDPRILKDPDMTIGVLTLADSSINFVVRPWCKTSDYWAVYFDSMQAIKEALDANGIEIPFPQMDVHLNKIN

SEQ ID NO: 77060 - protein, 298 aa, Vibrio cholerae
MRGLDYRWIEALDSVVSKGSFERAAEQLFISQSAVSQRIKQLEKYLAQPVLIREQPPRPTLVGKKLLGLYRRVCLIEQELVPELTNQEHVRPVSMSIATNADSLATWLLPALDKVMKSRQVELNLVIYGESRTLDKLKNGEVVGAISLEPQPITGCSAEYLGQMEYLCVASPEFYQKYFAKGVTPRSLIKAPAVSYDQYDELHNKFLWDYFAVPRDKVINHTVGSSEAFVRLALSGAAYCLIPRLQIISELESGALINMTPDFMLSYPIFWHHWQLETGVLLEISEAITAYAKSVLPQ

SEQ ID NO: 77061 - protein, 238 aa, Vibrio cholerae
MTLRIETMKLFAPVVLLLSVLSSPTFAQEWDFPHISTSGYGEVTAVPDMAEFSVKVVESTMNAEQAKAAVDKAVTEFTSKLVKSGVAQQNISSSNLYINPQYHYPANGKPELVGYQASRSITVRVEEVSKLNQYLDIALESGINQVNSIQLKVRDQEKYQQQARMAAIEDAKLKAQSLAKGFERRLEGVWRIDYNTPSVEPIMMRAANLSEKMDVADTYQESSLVIRDRVDVVYKLAP

SEQ ID NO: 77062 - protein, 470 aa, Vibrio cholerae
MKKTKIVCTIGPKTESVEKLTELVNAGMNVMRLNFSHGDYVEHGTRITNFRKVMEVTGKQLAILLDTKGPEIRTIKLENGDDVDLVAGQEFTFTTDTKVVGNKERVAVTYSGFAKDLNVGNRILVDDGLIEMEVLATTDTEVKCKVLNNGALGENKGVNLPGVSVNLPALSEKDKNDLKFGCEQGVDFVAASFIRKGSDVKEIREVLASHGGQNIQIISKIENQEGLDNFDEILELSDGIMVARGDLGVEIPAEEVIFAQKMMIEKCNRARKVVITATQMLDSMIKNPRPTRAEAGDVANAIMDGTDAVMLSGETAKGKYPVEAVKIMAQIAERTDPVLKAELGSRLDSPRLRITEAVCKGAVDTAEKLAAPLIIVATEAGKSARSVRKYFPTANIIAVTTNKKTAAQLVLSKGVTPVVVDAIDNTDAFYHLGKEIALQSGLGKKGDIVVMVSGALVASGTTNTASVHVL

SEQ ID NO: 77063 - protein, 610 aa, Vibrio cholerae
MCGIVGAVAQRDVAEILVQGLRRLEYRGYDSAGVAVVDSDKQLTRLRRLGKVQELADAVEAAQVAGGTGIAHTRWATHGEPSEINAHPHISGDITVVHNGIIENHEMLRTMLQDRGYVFTSQTDTEVIAHLVEWELRSASSLLEAVQTTVKQLTGAYGTVVMDRNDPSRLVVARSGSPIVIGFGIGENFLASDQLALLNVTRRFMYLEEGDVAEMTRRDVRVFDALGQPVQREISESNLEHDAADKGHYRHYMQKEIFEQPKALINTMEGRITHDCVVVESIGVHAAEILAKVEHVQIVACGTSYNAGMTARYWFESLAGVSCDVEIASEFRYRKFVTRPNSLLITLSQSGETADTLAALRLAKEKGYMAAMTICNVAGSSLVRESDFAFMTRAGTEIGVASTKAFTTQLVTLLMLVTALGKQQQRIGRELEAEIVHALHQLPKQIETALSFEKQIETLAEDFADKHHTLFLGRGEYYPIAVEASLKLKEISYIHAEAYAAGELKHGPLALIDADMPVVVVAPSNELLEKLKSNIEEVRARGGLLYVFADEVAGFEADETMKIIAMPHVSEIVAPIYYTIPMQLLSYHVALIKGTDVDQPRNLAKAVTVE

SEQ ID NO: 77064 - protein, 426 aa, Vibrio cholerae
MGQFRFLALIVAVLCFSVALFLPTADEPDQDSYSVPLNQSVNTSQPPSSEMVPSDIRLTPLPQPKRIHYMVKVGDTLSGIFAQLGVPYSILQKILSVDLDHLQLDMIQPGEELELMMDDMGQLSRLIYHMSIVEKAIYTRENDGSFSYDFQEISGEWREILFSGEINGSFSVSARRVGLTSSQVANITQVMKDKIDFSRSLRAGDRFDILVKQQYLGEHNTGNSEIKAISFKLAKGDVSAFLAEDGRFYDRAGNSLERAFNRYPVDKAYRQITSGFNPKRKHPVTGRVVPHNGTDFATPIGAPVYSTGDGKVIVVRKHPYAGNYLVIEHNSVYKTRYLHLDKILVKKGQLVKRGQKIALAGATGRLTGPHLHFEVLVRNRPVDAMKADLPIAKSLSSNQKTSFLARVSEFDHLVQANQQEVALDET

SEQ ID NO: 77065 - protein, 157 aa, Vibrio cholerae
MNPKTSEYQKQQRYQENEILEHAAEILANRYVRGDALTNPDATKEYVRCKLGSYEREVFALLLLDNQNRLIEFKELFQGTVDAASVYPREVVKAVLEVNAAAVIFAHNHPSGDSTPSQADRRITERLKDTLALVDVRVLDHIVTGDTCTSFAERGWL

SEQ ID NO: 77066 - protein, 626 aa, Vibrio cholerae
MNVGFVKKLIFISSFILLVTVAFVVWEGYTTAKKEVSVVIEDGINEIINKTERFVSLKLESDISLASSIVDSISLRISDEQYINDIINGNAIKKAFLSTGFGFDSNGKVIENDPNWEPEDDYDPRSRGWYQEAKKNKRIFITEPYLDTEGKNFLVSISSPVADTMNNFIGAMYFDVDLSRIQKNVDDINLFEAGYVFITSNTGKVIIHSNTDELGKNVKDIYNGFRLDKGKVVLSVNGVNKWLYTSPILGGDWFIIAVIDESIAMQSINKMKYELIFYSAIGLVFGGLILVFILRRLMSPLKTLDSAIKDIASGGGDLTKKLDTNLDKEFSELALGFNSFTEMLGSQIRQLKTIASGVLDGAEKTANEAEVSRLVVEQQLQELEQLATAMNEMAMTASEVANSAQVAADAAKEGESASLEGSSVVHETTDAIQRLSIRIGSSVEDVKELVKATDRIETVLDVINDIADQTNLLALNAAIEAARAGESGRGFAVVADEVRTLAQRTQQSTMQISEIIEQLQEGAKNVSRSMDESKLETDIVVEKTNQVNEKISLVQQAIHRISDMNLQIASAAEEQSLVAEEINNNTVNIKDLSIKLSEAASNAGTEMNAQVSKVKEQNELLNEFKI

SEQ ID NO: 77067 - protein, 625 aa, Vibrio cholerae
MDQNPQSQLKQLVLRGKEQGYLTYAEVNDHLPAEIVDSEQVEDIIQMINDMGIKVVETAPDADDLALSDDTTITDEDAAEAAAAALSSVESEIGRTTDPVRMYMREMGTVELLTREGEIDIAKRIEDGINQVQSAIAEYPGTIPYILEQFDRVQAEELRLTDLISGFVDPNDMETEAPTATHIGSELSEADLADEDDAVVEDEDEDEDEDGDGESSDSEEEVGIDPELAREKFNELRGKFQNLQLAVNEFGRDSHQASEASDLVLDIFREFRLTPKQFDHLVETLRTSMDRVRTQERLVMKAVVEVAKMPKKSFIALFTGNESNEEWLDKVLASDKPYVAKVREQEEEIRRSIQKLQMIEQETSLSVERIKDISRRMSIGEAKARRAKKEMVEANLRLVISIAKKYTNRGLQFLDLIQEGNIGLMKAVDKFEYRRGYKFSTYATWWIRQAITRSIADQARTIRIPVHMIETINKLNRISRQMLQEMGREPLPEELAERMQMPEDKIRKVLKIAKEPISMETPIGDDEDSHLGDFIEDTTLELPLDSATATSLKAATRDVLAGLTPREAKVLRMRFGIDMNTDHTLEEVGKQFDVTRERIRQIEAKALRKLRHPSRSEVLRSFLDE

SEQ ID NO: 77068 - protein, 147 aa, Vibrio cholerae
MALIENLKEEQKLAMKAKDKPRLGAIRLVLAAIKQREVDEQITLSDDDIVAVLTKMVKQRRDSVSQYEAAGRQDLADAEKAEITVLEEFMPQPLSDDEVKALIDSAITESAAAGMQDMGKVMAVLKPHIQGRADMGKVSGLVRAKLA

SEQ ID NO: 77069 - protein, 71 aa, Vibrio cholerae
MPVVKVRENEPFDVALRRFKRSCEKAGILSEVRRREHYEKPTTVRKRAKAAAQKRHAKKLARENARRVRLY

SEQ ID NO: 77070 - protein, 208 aa, Vibrio cholerae
MTPLALSMIIFAYLLGSISSAVLICRVLRLPDPRNVGSQNPGATNVLRIGGKKAAVAVLLCDMLKGTIPVWGGYFLNIEPFMLGLVAIAACLGHMYPIFFHFKGGKGVATALGAIAPIGLDLTAMVMATWLVVVVLFRYSSLAALVTVLLAPLYTWLIKPQYTLPVAMLCCLIVLRHHQNVKRLFAGTEPKVGEKNKKPSDDEESRVV

SEQ ID NO: 77071 - protein, 232 aa, Vibrio cholerae
MNNMTAIVPAAGVGSRMQADRPKQYLTLLDKTVLEHTVEHLLEHPLIEHVVVAVSADDPYFANLPLAHHPRVIRVDGGKERADSVLSALEYVCQHRLSEWVLVHDAARPCVTHADITQLITTALAHPIGAILASPVRDTMKRGDHLQQIVHTVDRTALWHALTPQMFRAQSLRERLFAALQQQVTITDEASAFEWRGEKPALVAGRADNLKITQPEDLALAEFYLSRNKEKS

SEQ ID NO: 77072 - protein, 158 aa, Vibrio cholerae
MIRIGHGFDVHRFGGEGPIIIGGVKIPYEQGLIAHSDGDVALHALSDALLGAIAAGDIGRHFPDTDDKWKGADSRELLKDVYRRVKAQGYVLGNADVTIIAQAPKMAPYIQAMCAAIAEDLETDLGNINVKATTTEKLGFTGRKEGIACEAVVLLRKA

SEQ ID NO: 77073 - protein, 862 aa, Vibrio cholerae
MMKSNASPSESLSHHTPMMQQYLRLKAENPDILLFYRMGDFYELFYDDAKRASELLDISLTKRGASAGEPIPMAGVPFHAVEGYLAKLVQMGESVAICEQIGDPATSKGPVERKVVRIVTPGTVTDEALLSERVDNLIAAIYHHNGRFGYATMDITSGRFQLSEPQTEEEMAAELQRTSPRELLFPEDFSPVHLMASRQGNRRRPIWEFELDTAKQQLNQQFGTRDLVGFGVEQAKLGLCAAGCLIQYVKDTQRTALPHIRSLTWDRQDQSVILDAATRRNLELTHNLAGGTDNTLAEVLDHCATPMGSRMLKRWIHQPMRDNATLNQRLDAITELKETALYGELHPVLKQIGDIERILARLALRSARPRDLARLRHAMQQLPELHSVMSELKQPHLTELRTHAEPMDELCDLLERAIKENPPVVIRDGGVIADGYSAELDEWRDLANGATEFLERLEAEERDRHGIDTLKVGYNNVHGFYIQVSRGQSHLVPPHYVRRQTLKNAERYIIEELKQHEDKVLNSKSRALALEKQLWEELFDLLMPHLEQLQQLAASVAQLDVLQNLAERAENLEYCRPTLVQEAGIHIQGGRHPVVERVMNEPFIANPIELNPQRRMLIITGPNMGGKSTYMRQTALIALMAHIGSYVPAESASIGPLDRIFTRIGASDDLASGRSTFMVEMTETANILHNATRNSLVLMDEIGRGTSTYDGLSLAWASAEWLAKEIGAMTLFATHYFELTELPNVLPHLANVHLDAVEHGDGIAFMHAVQEGAASKSYGLAVAGLAGVPKPVIKNARAKLQQLELLSSQPAETRKPSRVDIANQLSLIPEPSAVEQALAGVDPDQLTPRQALDMLYQLKKLL

SEQ ID NO: 77074 - protein, 333 aa, Vibrio cholerae
MNRIKSTLTALLLAGSFQASAADQTILNSSYDIARELFVAYNPVFAEHWQQKTGKTVEIKQSHAGSSAQARSILQGLAADVVTFNQVTDVQILHDKGKLIPANWQTLLPNASSPYYSTTAFLVRKGNPKNIQDWSDLVRDDVKSVFPNPKTSGNARYTYLAALGFAQKQFGQDNQVQQDEFLKKFLANVAVFDTGGRGATTSFVERGIGDVLITFESEVNNIRQQYGADDYQVVVPKTSILAEFPVAVVEKVAKRNGTYDVATEYVSYLYSEPAQRLLAEFNYRVHDAKVQAEFAERFPAVELLTVEGIAGGWEQAMQTQFANGAKLDQLLRR

SEQ ID NO: 77075 - protein, 412 aa, Vibrio cholerae
MSISQQIRFKTLTEPNFFLYRGGHCTNQQYNKPQHDKSASTRFRHNYLSPESDYPERVMDENKQKALAAALGQIEKQFGKGSIMRLGDNRAMDVETISTGSLSLDIALGAGGLPMGRIVEIFGPESSGKTTLTLELIAAAQREGKTCAFIDAEHALDPVYAKKLGVNIDELLVSQPDTGEQALEICDALARSGAVDVIVVDSVAALTPKAEIEGEMGDSHMGLQARMLSQAMRKLTGNLKQSNCMCIFINQIRMKIGVMFGNPETTTGGNALKFYASVRLDIRRTGAIKEGEEVVGNETRIKVVKNKIAAPFKEANTQIMYGQGFNREGELIDLGVKHKMVEKSGAWYSYNGDKIGQGKANAYKYLKENPEIAKTLDKKLREMLLNPENMQLIAETSSAADDVEFGAVPEEF

SEQ ID NO: 77076 - protein, 152 aa, Vibrio cholerae
MSFDLATCRQSALQLLSRRDHSEYELYQKLALKGHPAEVIDEVVKYVLELGYLSDARYAASQARQIVHKGYGEQRLRQQLKEKRVAEEVIEQALAEQTIDWFELAKEVAHKKFKSGISHERSQYAKQVRYLQYRGFNFEQIRYALQASESDE

SEQ ID NO: 77077 - protein, 860 aa, Vibrio cholerae
MFMSTDEVRRAFLSFFESKGHQIVESSSLVPANDPTLLFTNAGMNQFKDCFLGLEKRAYTRATTAQRCVRAGGKHNDLENVGFTARHHTFFEMLGNFSFGDYFKEDAIQYAWEFLTDVLQLPKERLLVTVYETDDEAFDIWNKKVGIPADRIIRIGDKKGGKKFDSDNFWQMGDTGPCGPCTEIFYDHGDHIWGGPPGSPEEDGDRFIEIWNNVFMQFNRHADGTMEPLPKPSVDTGMGIERISAIMQGVHSNYEIDVFQTLIKAAADAIGYQDLTNQSLRVVADHIRSCAFLIVDGVMPSNEGRGYVLRRIIRRAVRHGNKLGAQGAFFHKLVGPLAEVMGTAGVELKKQQALVEKVLRIEEENFGRTLDRGMSILNDALDQLSGQVLDGETVFKLYDTYGFPADLTNDVARERGFSIDEAGFEQAMEEQRQRAREAGQFGTDYNSLIKSATNTEFCGYTASRGQSVVREMFVEGAEVSTLSAGDKAIIVLDNTPFYAESGGQCGDTGVLKTDAGIFHVEDTQKLGNAIAHHGVIAQGVLATGDQVDAIVDEKRRAAISLNHSATHLLHAALRKVLGEHVAQKGSLVRAETLRFDFSHLEAMTAAEIKEVERLVNQEVRRNHSIETNIMNIDEAKAKGAMALFGEKYDDQVRVLSMGDFSTELCGGIHASNTGDIGLFKIISEGGIAAGIRRIEAVTGEGALDYLDAQQAQHDAKVSEMAAKAKLLEKEIQQLKDKLAAKESAGLINQVKQIAGVNVLVAQLNGADNKALRGMVDDLKNQLSSGIIMLGNVAEGKVGLIAGVTNDLTNKVKAGELVNMVALQVGGKGGGRPDMAQAGGTDAHALPSALESVDAWIAERL

SEQ ID NO: 77078 - protein, 65 aa, Vibrio cholerae
MLILTRRVGETLMIGDEVTVTVLGVKGNQVRIGVNAPKEVSVHREEIYMRIQAEKGNGGVASGNY

SEQ ID NO: 77079 - protein, 597 aa, Vibrio cholerae
MSMSKPLAITDVVLRDAHQSLFATRMRIEDMLPIAAELDKIGYWSLETWGGATFDACIRFLGEDPWERLRALKKAMPNTPMQMLLRGQNLLGYRHYADDVVEKFVERAHVNGMDVFRIFDAMNDVRNFEKAVKATIGVGAHAQGTLSYTTSPVHNTQTWVDLAKRLEDLGCHSLCIKDMSGLLKPYEAEELITRIKQSCAVPLALHCHATTGLSTATAVKAVEAGIDILDTAISSMSQTYGHTPTETVVAMLQDTPRDTQLKLEQLEPIAAYFREVRKKYAKFEGQLKGVDSRILIAQVPGGMLTNMESQLKEQGAAHRIDEVLEEIPRVRQDLGFIPLVTPTSQIVGTQAVINVLTGERYKSITKETAGVLKGEYGATPASVNAELQARVLEGGQAITCRPADLLQDELDHLTKELLEKAQVEKITLADAKVDDVLTYALFPQVGLKFLKNRHNPEAFEPAPGKEPAPVATAPASTKPAAGIESYSVKVDGVVYDVEVGSQGQLTSVVPAGQKAAPKLAVATPTQGAEAVAAPLAGTIFKIQVEQGDEVAEGDVLIVLEAMKMETEIRAARSGVIQELHVKEGDSVRVGASLLSLA

SEQ ID NO: 77080 - protein, 337 aa, Vibrio cholerae
MVYIQRDASASLFIRAIGIVEMENKRIVITQFGTPDVLAMQSAPIPTPKAGEVLVKVAFASVNPIDVKTRAGLGWAAAQNKDKLPWTPGYDISGRVVALGEGVSRLKERDNVAGFIGFPLRGGGYSQYVCVPEQELSLVPDAVTLEAAAALPLAGQTAAQALSKAQVQEGERVLILAGAGGVGHIAVQIALAAKTEVFTTCSEANLDYLATLGAHAINYQFAPVSQRLEEVDVLIDLVGGEAALDALKCLKDNARVITVPTLTAELICEKAKLLGFEATGMLVDPNPEQLDTMLYMVSVGLLKIEIQHIYSLLDAAQAHEQIESGHTRGKLLLDMKC

SEQ ID NO: 77081 - protein, 952 aa, Vibrio cholerae
MMRKVALFGFSLLLLAGCSSSDSSLPLFSSLPKGVTLVEEVKAEPGKVMIPYSKYRLDNGLTVILSPDDSDPLVHVDVTYHVGSAREEIGKSGFAHFFEHMMFQGSKHVGDQQHFRLITEAGGSLNGTTNRDRTNYFETVPANQLEKMLWLEADRMGFLLDAVSQRKFEIQRDTVKNERAQNYDNRPYGLMWEKMGEALYPEGHPYSWQTIGYVSDLDRVDVNDLKAFFLRWYGPNNAVLTIGGDLDVKQTLAWVQKYFGSIPKGPDVVDAPKQPARLSEDRFITLEDRVQQPMLLIGWPTQYWGAEDQVALDALASALGSGNNSLLYQELVKTQKAVDAGAFQDCAELACTFYVYAMAPSGAKGKLAPLYQETLQVLEKFKQQGVSASRLEQIIGSEEASAVFALESVKGKVSQLAANQTFFDQPDRIESQLEKIRAVTPESVKQVFTRYLDGQPKVTLSVVAKGKTDFAVRPATFITPERQLPEYQKIGDEQLAYREVKDSFDRSQMPQVAQAVQPRLPKLYDVYFDNGVQLLGTQTRETPTVLIEIQLPAGERQVAMGKEGLANLTASLLQEGSQNRSAEAIQAQLDKLGSSIQVVAGAYSTSIVVSSLKKNLPETLQISQEMLLKPAFKQSDFARLQQQMLQGVVYQHQQPSWLASQATRQVLWGESLFARSGDGTQASISALTLKDVKQFYRQHYTPHGAQIAVVGDISAREIRQQLQFIADWKGEAAPLINPQVVPTLTKQKIYLVDKPGAPQSIIRMVRKGLPFDATGELYLTQLANFNLAGNFNSRINQNLREDKGYTYGAGSYFASNREIGAIVFNAPVRADVTVEAIQEMIKEMHHFSQAGMSEEEMKFLRLAVGQQDALMYETPAQKAQLVSSILTYSLDRDYLQQRNEIVKSVDRSTLNELAAKWFNPEDYQIIVVGDAKRLKPQLEKLGIPLEELEIIR

SEQ ID NO: 77082 - protein, 267 aa, Vibrio cholerae
MAGMDNLIAIAAAMLYLLSIATIVPGLVNQTGIRAKTVFISAAIALLFHGWLLSDLILHSSGQNLSILNVASLISFIISLAMSLAMFKTRLWFLLPVAYSFSAINLSAATFLPGTFITHLESDPKLLLHISLALFSYSTLSIGALYALQLAWLDHKLKSKKVFSINPNLPPLLLVERQLFKIILIGNLLLTGTLLTGFIFVQDMFAQGKAHKGILSFVAWIVYSILLWGHYRKGWRGKKVTWFAVAGATLLTLAYFGSRFVREIILR

SEQ ID NO: 77083 - protein, 461 aa, Vibrio cholerae
MFENLTDRLSKTLKNISGKGRLTEDNIKDTLREVRMALLEADVALPVVRDFVNRVKEGAVGVEVSKSLTPGQEFIKIVRQQLEAVMGESNEALNLAAQPPAVILMAGLQGAGKTTSVGKLSKLLKERDKKKVLVVSADVYRPAAIKQLETLANDLGVDFFPSTPDQKPIDIANAAIDHAKKKFYDVLIVDTAGRLAIDEQMMAEIQALHKAINPVETLFVVDAMTGQDAADTAKAFGDALPLTGVILTKVDGDARGGAALSVRHITGKPIKFIGVGEKTDALEPFHPDRIASRILGMGDVLSLIEDLQRNVDQEKAEKLAKKFKEKKGFDLEDFREQLGQMKNMGGMMGMLDKLPGMSQLPADMKDKVDDRVFKQMEAIINSMTMKERQNPDLIKGSRKKRIAAGSGTQVQDVNRLLKQFTQMQKMMKKMQQGGMKGMMRNMQGLMGGGGRGGFGGGFFGR

SEQ ID NO: 77084 - protein, 82 aa, Vibrio cholerae
MVTIRLARHGAKKRPFYQIVVADSRNSATGRFIEKVGFFNPTATGQEEGLRLDLDRVNHWVSQGASLSDRVAQLVKTAQKAA

SEQ ID NO: 77085 - protein, 184 aa, Vibrio cholerae
MSMKGKETMSKQNEKLVVGKLGSSYGIRGWLKVFSYTDNPESIFDYSPWYIDQKGEWVEYKVEGWKRHNKGWVVKLQGLDVREDAHLLTNFEIAIDPASLPELSEDEFYWRELFGMQVVTTNGYDLGVVTDMMETGSNDVLVVKANLKDAFGQKERLIPFLEEQVIKVVDRQAQRIEVDWDPAF

SEQ ID NO: 77086 - protein, 247 aa, Vibrio cholerae
MWVGIVSLFPEMFRSVTDFGVTGQAVKKGLLSVEAWNPRDFAHDKRRTVDDKPYGGGPGMLMMVQPLRDAIHAAKQASPGKTKVIYLSPQGRKLDQQGVEELAQNQNLILICGRYEGVDERIIESEVDEEWSIGDFVMTGGELPAMTLIDSVSRFIPGVLGDFASAEEDSFANGLLDCPHYTRPEVLDGKEVPAVLKSGNHEDIRRWRLKQSLGRTWLRRPELLENLALTDEQEQLLTEYIKETRHQ

SEQ ID NO: 77087 - protein, 117 aa, Vibrio cholerae
MSNIIKALEQEQMKQDLPQFAPGDTVVVQVKVKEGDRERLQAFEGIVIAIRNRGLHSAFTVRKISNGEGVERTFQTHSPVVDSIEVKRRGAVRRAKLYYLRDLSGKAARIKEKLAKK

SEQ ID NO: 77088 - protein, 456 aa, Vibrio cholerae
MMKKPLLVLTALSLSLSAILSPLPATAALPLSVNGEQIPSLAPMLEKVTPAVVSIAVEGTQVSRQRLPDQFRFFFGPDFPTEQLQERPFRGLGSGVIINADKGYVVTNYHVINGAEKIRVKLYDGREFDAELVGGDEMSDVALLKLNKAKNLTEIRIADSDKLRVGDFAVAIGNPFGLGQTVTSGIVSALGRSGLNIENFENFIQTDAAINSGNSGGALVNLNGELIGINTAILGPNGGNVGIGFAIPSNMMKNLTDQILEFGEVKRGMLGVQGGEITSELADALGYESSKGAFVSQVVPDSAADKAGIKAGDIITSLNGKKIDTFSELRAKVATLGAGKTITLGVLRDGKNQNIDVTLGEQQNAKTKAESLHQGLSGAELSNTTDSDPIQGVKVTEVQKGSAAESYQLQKDDIIIGVNRKRVKNIAELRAIMEKSPNILALNIQRGERTLYLVVR

SEQ ID NO: 77089 - protein, 145 aa, Vibrio cholerae
MPWIYAIAGLLVGIAVGMLIARLTTPQYKTQKNLQKELESAKFTLEQQRQELSDHFAQTAEMLDTLGKDYTKLYQHMAKTATDLIPNLPEQDNPFSKLAQQKEESKQPEELEQPPKDYALGATGLLRGEEKAIIRSADLLNAKAS

SEQ ID NO: 77090 - protein, 142 aa, Vibrio cholerae
MKTFVAKPETVKRDWYVVDAEGKTLGRLASEIASRLRGKHKAEYTPHVDTGDYIIVVNAEKVTVTGNKAKNKMYHRHSEFPGGLKSFSFEKLIERKPEMVLELAVKGMLPKGPLGRAMYRKLKVYAGAEHNHAAQQPKVLDI

SEQ ID NO: 77091 - protein, 130 aa, Vibrio cholerae
MAENQYYGTGRRKSSAARVFIKPGSGNIVINKRSLEEYFGRPTSCMVVKQPLELVDMVEKLDLYITVKGGGISGQAGAIRHGITRALMEYDESLRPVLRAAGYVTRDARRVERKKVGLRKARRRPQFSKR

SEQ ID NO: 77092 - protein, 211 aa, Vibrio cholerae
MAVAANKRSVMTLFSSASDMYSHQVRIVLAEKGVSFEVELVDENNLPAELIELNPYKTVPTLVDRELALYDSKIIMEYLDERFPHPPLMPVYPVARGNSRLMIYRIERNWYSLAEKVVNGSPEVAENARNKLRNDLLTLGPVFAEFEYFMSEEFSLIDCYLAPLLWRLPVLGIDLIGPGSKELKVYMNRVFERDSFLASLTEAEREMRLAR

SEQ ID NO: 77093 - protein, 288 aa, Vibrio cholerae
MTDNKTVPNGAPILYIVPTPIGNLGDITQRALDVLASVDMIAVEDTRHTGKLLAHFNISTKTFALHDHNEQQKAQVLVDKLLSGLSIALVSDAGTPLISDPGYHLVTQCRQAGVKVVPLPGPCAVITALSASGLPSDSFSFEGFLPAKSKARKDKLLEIAKVSRTCIFYESPHRICESLQDMLDVLGGEREVVLARELTKTFETIQGMPLAELITWIAEDDNRKKGEMVLLVHGYRDAGEQQLPDEALRTLTILTKELPLKKAAALVAEIHQLKKNALYKWGLENLGE

SEQ ID NO: 77094 - protein, 264 aa, Vibrio cholerae
MKKITINDLMKWKQEGRKFATSTAYDASFAQLFESQEMPVLLVGDSLGMVLQGETDTLPVTVDDIAYHTRCVRKGSPNCLLMADMPFMSYATPEQACENAAKLVRAGANMVKIEGGDWLVDTVKMLTERAVPVCAHLGLTPQSVNIFGGYKVQGREQDKADRMVRDALALQEAGAQIVLLECVPAELANRITQILDVPVIGIGAGNGTDGQILVMHDMFGISANYMPKFSKNFLAETGDIRQAVAKYIEDVASGAFPDLAHTIA

SEQ ID NO: 77095 - protein, 167 aa, Vibrio cholerae
MMLAYIAIGSNLGDPVAQAQLAIQQLTLLPKSRLIAASSLYSSTPMGPQNQPDYINAVAAIETELTPLELLDCTQRIELEQGRVRKSERWGPRTLDLDIVLYGNEVIETERLTIPHYGMKVREFVLYPLAEIAPNLTLPDGTEIQALLQQVPLNGLSIWHSPTSSKD

SEQ ID NO: 77096 - protein, 457 aa, Vibrio cholerae
MNNNDFEPSNTRTYPDLALTIIPRQEHPISRQQISENALKVLYRLHGAGFEAFLVGGGVRDLLLGGKPKDFDVATNATPEQLRQLFRNCRLIGRRFRLAHIMFGRDIVEVATFRGHHQESSQSQNIAAQSEAGMLLRDNVYGTIDEDAERRDFTINAMYYNIADYSIHDYAGGMEDLEDRLVRLIGDPETRYREDPVRMLRAVRFAVKLDFDIEEDTAAPIEQLAPLLRDIPAARLYEESLKMLQAGHGLETYHLMRQYNLFQQLFPTIAEHFTADHSSKTEQMLDLVLDATDIRVEEDLRINPAFMFAAMLWYPMIDLADRLMESLDLNEFDAITEASNRILDEVVKRIAIPRRHTTTVRDIWQLQQRLPRRSGKRAFRLLELNKFRAGFDFLEMRGEIEGGETKQLAEWWATFQSAGRNMRQAMVGDIGNATGSSKSGARRRKPSRNKSKSKSSE

SEQ ID NO: 77097 - protein, 304 aa, Vibrio cholerae
MHLKGKSPMNYIGRFAPSPSGPLHFGSLIAALGSYFQAKAQQGTWLVRIEDLDPPREMPGAAAHILRTLEAYRLHWDGTVVYQSQRHALYQDQIDAWLSTGQAYYCQCTRKAIKAMGGFYNGHCKIHPPARQQDCSIRLRMDNQVQQFIDLKHGTITIPKALAEEDFIIKRRDGLFAYNLAVVLDDIDQGVTQVVRGADLIEPTGRQISLYHTLKQKPVSYLHLPLAMDGNGNKLSKQNHAPAIDPTAPRQTISHAMQFLGFTLPTDFSDASAEQMLAWGCQHWQVSQLPEAIEITPRFSNGPA

SEQ ID NO: 77098 - protein, 148 aa, Vibrio cholerae
MTESKKKTLGILAIAGVEPYQEKPGEEYMSPGQITHFTKILEAWRNQLREEVDRTVHHMQDEAANFPDPVDRASQEEEFSLELRNRDRERRLIKKIEKTLDKIKEEDFGYCESCGVEIGIRRLEARPTADLCIDCKTLAEIKEKQMLG

SEQ ID NO: 77099 - protein, 820 aa, Vibrio cholerae
MSPLPIIEVMPKLLSGITNSPQLILKAAPGAGKSTYFPLQLLQAGGFHGKIIMLEPRRLAARNIARYLAQQLGEEVGQRVGYRVRGENRVSRATQLEIVTEGIMTRMLQNDPELDGVDVLIFDEFHERSIHADTALALALEVQSALREDLKIVVMSATLDQQALQNLLPQASYVESQGRGFPIEIRYQPLRSDEPLVTAMQRQIRHLLQHETGSLLAFLPGAASINQLTEQLSDLASEVEICPLYGQMEFAAQQRAIAPTAAGRRKVVLATNIAETSLTIEGIRIVLDSGLERSARFDLKTGITRLEQVRIAQSSAEQRAGRAGRLEPGICVRLYSEAQLKQQPWVPEPEMLHTDLAPLALELAQWGAQPSDLAWLNLPPSSAFAQAQQLLQRLGLLDARTQITAAGKEAHLLGVEPRIAAMLLSADRLGESALQSALALTVLLEEPERQVIDVQHSLHRWQQGRHPKQKLLIQRAQSLAHKLDTAFSLSSVDSAWLPLVACLAFPDRIAQQRGQQTGQFLLANGHGAWLAVEDRLSAADYLVALDLMRGQTQASQIFSALELDIHALERVLPALISRVEQVDWDEKAGRLSAEAQWRIDQLVLRREKLPEPDKQKMTQALLSYVRRKGLTVLQWSEDASEWLARARCAAEWLPEEAWPALDDETLLARLELWLEPYLAGVTSVKGLQSVSVLQALKHYLGWELSQQLDEWLPTHHLLPTGNHKKIRYQLGMEPTLSVRMQEVFGEQSSPRVAKGTRAVVMELLSPAQRPLQVTRDLASFWAGAYKEVQKEMKGRYPKHVWPDDPANHVATSKTKRQLNA

SEQ ID NO: 77100 - protein, 777 aa, Vibrio cholerae
MTRKSSNRSRGRKARSGKSASSSKLQIWLGRIWSIGWKLALTLAAVLVFIGIYLDSMIKQRFEGQLFDLPTVVYARILTLEPGNGLSLQELRNELDVLNYRKVAQPRFPGEYASSSSRIELIRRPFEFADGPEPDRRVMLTFDGSGLNKIESLEQKRELGYLRLEPKLMGMLEKDSPEQRLFLRRDQFPEVLVDALLVTEDRDFYQHDGVSPLAIGRAMVVNLKAGRTVQGGSTLTQQLAKNIFLSSDRTLWRKLREAYMALIIDYRYSKDRILEAYLNEVYLGQSGADAIHGFGLASRLYFGQPLQELRIDQLALLVGMVKGPSYYNPMRYAERARERRDLVLKLMMEHDILTAPEYQQAVTRPLDVQKTAQIASRQPAYFQQVSIELKEKLGDKFKADSGLRVFTSLDPVSQSKLEQAIHDQIPQLAKTAGKDLEAAAIAVDRHSGEIRAMVGGKRTGYDGFNRVLNASRQIGSLVKPAVYLTALAHPDQYNLATTLEDKPLTLKGSEGSAWTPRNYDRQYRGEVPLYLALAQSLNVPTVALGMKLGIDQVSATLGKLGVNRDEIRPVPSMLLGSFSLTPYQVAQMYQTLTNSGKKAPLSALRSVLDLEGNVLYESLPRVSQAVDQQAAWLTTYAMKQGVQEGTGRYLNAQFSSAALAGKTGTTNDNRDSWFVGVDGREVTTIWLGRDDNQPTKLTGASGALRVYAQYLKYRIPEKLQLPWPEGITTFGFAKQTQGGLKLDCDNAFKLPIWDNQQQLKQQCENRPTEWIKKLFEW

SEQ ID NO: 77101 - protein, 865 aa, Vibrio cholerae
MLEAYRKHVAERAAEGVVPKPLDAEQVAGLVELLKNPPQGEEAFILDLLENRIPPGVDEAAYVKAGFLTAVARGEVASPLVSREKAAELLGTMQGGYNIEPLIELLDDSALAPIAAKALSHTLLMFDNFYDVEEKAKAGNPFAKQVLQSWADAEWFLSKPALPEKVTLTVFKVTGETNTDDLSPAPDAWSRPDIPVHALAMLKNARDGIEPDVPGKVGPIKQIEALKAKGHQLVYVGDVVGTGSSRKSATNSVLWFMGDDIPNVPNKRTGGYVLGGKIAPIFFNTMEDAGALPIEVDVSKLNMGDVIDVYPFEGKVCNHATGEVLATFKLKTDVLYDEVRAGGRIPLIVGRGLTDKARHALGLEASKEFRRPVAVADSGKGYTLAQKMVGKACGVQGIRPGTYCEPKMTTVGSQDTTGPMTRDELKDLACLGFSADLVMQSFCHTSAYPKPVDVQTHHTLPDFIMNRGGVSLRPGDGVIHSWLNRMLLPDTVGTGGDSHTRFPLGISFPAGSGLVAFAAATGVMPLDMPESVLVRFKGKMQPGITLRDLVHAIPYYGIKQGLLTVEKAGKINEFSGRILEIEGVEHLTVEQAFELSDASAERSAAGCTVKLSQASIEEYLNSNIVMLKWMIAEGYGDRRTIERRIQAMEAWLANPTLMEADKDAQYAHVIEIDLAEIKEPILCAPNDPDDARLLSECAGETINEVFIGSCMTNIGHFRAAGKLLEKFNGQLNTRLWVAPPTKMDRDQLIEEGYYGIFGRAGVRIETPGCSLCMGNQARVADKATVMSTSTRNFPNRLGTGANVYLSSAELAAVGAILGRIPSVAEYMDYAKQIDAAAADTYRYLNFHRMGQYTSKADSVIFQEPA

SEQ ID NO: 77102 - protein, 340 aa, Vibrio cholerae
MQPYTAPSEIALRQLDYFADKHVLVAGEVEDRFPIELRQYCASVSVFTTHYGYYSQLKAYPEITRYFGEQLTADLNADLILLYWPKAKQEAEYLLAMLLAKLGTGTEIVVVGENRSGVKSIEKMFAAYGPIHKYDSARRCSFYWGHCVHTPAAFDIEQWFKSYAVDYQGHELTIRSLPGVFSHGEFDLGSRLLLDTLPPLSGKVIDIGSGAGVLGCVMAKLNPHIELEMTDISALAIRSSQETLVANQLHGHVYPSDMFSDTGHHYNYIVTNPPFHSGLETSYSATERLLAESVDHLASGGSIWVVANSFLKYPPILEQAFGHCDIAAKTNKFAIYHAKK

SEQ ID NO: 77103 - protein, 361 aa, Vibrio cholerae
MSEKIKLASSHRVLVVALLASALACYWLVEPYINSIIMAFIISLLMFPIHDWFEKKLPSHNNLAAFLSCVVLTVIIVIPLLLIFGAIVQQGSKFSQNLYAWVTQGGIQALFNHPWVVKGLSLANHYLPFEEISPQQIAQRIGQFATTFGSNLVSISAKILGDATSFVMHFFLMLFVLFFLLRDHDKIISAIRHILPLSRSQEDRLLSEIENVSKSAVMGSFLTAIAQGVAGGIGMWLAGFPGLFWGTMMGFASFIPVVGTALIWIPATLYLFLTGDTTWAIFLAIWSVAVVGSIDNLLRPFLMQGSAGMNTLMIFFSLLGGIQLFGLIGLIYGPLIFAITMVLFNIYEEEFRSFLDQQDRS

SEQ ID NO: 77104 - protein, 487 aa, Vibrio cholerae
MVDVIAMLFRFIPVWLLSISGFLIASPIYAQTPLTAATTKLPQGARYSLLIEDVALQQNTLELNTHLYYPPASTQKILTALAAKLELGDKFRFHTDLMRSGQDWIIRFSGDPTLTTADLTTLLKAMKAQSGGRIEGDLWLDNSVFSGYERAVGWPWDILGVCYSAPASAINLDANCIQASIYTEPQGKTRVYVPEHYPVHVQSQAISVTQSEQESLLCDLELTATPENHYTLDGCLALRDKPLPLKFAVQDTGIYTQRVVYRLLSQLNIELKGKIKVGKANTKQAQKIASHHSQPLPVLLKTMLQESDNLIADTLTKALGHRFYSQPGSFTNGTQAIKQIFYSRTGISLEDTQLADGSGLSRNNRMRPQVMLETLRYLYQHEAELGLIAMLPSAGESGTLQYRRSMRAPQISGQIKAKSGSLYGTYNMAGFVMDENQRPKTLFVQFVTDYFPPRSNPEVAVEPPIIQFETQLYQELIQFNRLASKPN

SEQ ID NO: 77105 - protein, 350 aa, Vibrio cholerae
MDNKLGLNKMNKTLIALAVSAAAVATGAYADGINQSGDKAGSTVYSAKGTSLEVGGRAEARLSLKDGKAQDNSRVRLNFLGKAEINDSLYGVGFYEGEFTTNDQGKNASNNSLDNRYTYAGIGGTYGEVTYGKNDGALGVITDFTDIMSYHGNTAAEKIAVADRVDNMLAYKGQFGDLGVKASYRFADRNAVDAMGNVVTETNAAKYSDNGEDGYSLSAIYTFGDTGFNVGAGYADQDDQNEYMLAASYRMENLYFAGLFTDGELAKDVDYTGYELAAGYKLGQAAFTATYNNAETAKETSADNFAIDATYYFKPNFRSYISYQFNLLDSDKVGKVASEDELAIGLRYDF

SEQ ID NO: 77106 - protein, 651 aa, Vibrio cholerae
MSDMAKNLILWLVIAVVLMSVFQSFGPGENNGRAVDYTTFVKEVGQGQIQEAQFNNGEITFMRRGGGSRYVTYMPVYDQKLLDDLINQDVKVQGTPPEEQSLLGTIFISWFPMILLIGVWIFFMRQMQGGGGKGAMSFGKSKARMMSEDQIKTTFSDVAGCDEAKEDVKELVDYLRDPSRFQKLGGKIPTGVLMVGPPGTGKTLLAKAIAGEAKVPFFTISGSDFVEMFVGVGASRVRDMFEQAKKASPCIIFIDEIDAVGRQRGAGVGGGHDEREQTLNQMLVEMDGFEGNEGIIVIAATNRPDVLDPALLRPGRFDRQVVVGLPDVRGREQILKVHMRKVPLANDVEPSLIARGTPGFSGADLANLVNEAALFAARGNKRNVSMVEFELAKDKIMMGAERRSMVMSEEIKESTAYHEAGHAVVGRLVPEHDPVYKVSIIPRGRALGVTMYLPEQDRVSMSKQHLESMISSLYGGRLAEELIYGKEKVSTGASNDIERATEIARKMVTQWGFSEKLGPMLYAEDEGEVFLGRSVTQTKHMSDDTAKLIDDEVRQIIDRNYERARQIIMDNMDIMHAMKDALMKYETIDAGQIDDLMARKPVIREPAGWGEQSKTPSAPEVKAEPEAKAEESTAETASSDVATASEKKDAE

SEQ ID NO: 77107 - protein, 278 aa, Vibrio cholerae
MLKISHADKQLELHSPVVMGILNTTPDSFSDGGRYVDLDVALARAQQMIDLGVAIIDIGGESTRPGAPDVALEEELQRVIPLIKAIRKQNAEVWISIDTSKAEVMRQALAAGADLINDVRALQEPGALEVAAQAQVPVCIMHMQGQPRTMQANPHYYNIIEEVCQFLAERIAQCEAAGIKRENIILDPGFGFGKSVQHNYHLLAHLEQFHRFGLPVLAGMSRKSMIFKTLNKQPAECVAGSVACATLAAQKGAQIIRVHDVEQTIDALKMVQMMHNNL

SEQ ID NO: 77108 - protein, 446 aa, Vibrio cholerae
MSDKRRYFGTDGVRGKVGQYPITPDFVLKLGWAAGRVLAKQGTRKVIIGKDTRISGYMLESALEAGLAAAGLKATFTGPMPTPAVAYLTQTFRAEAGIVISASHNPYYDNGIKFFSYEGTKLPDDIELAIEAELDKDIECVESAELGKASRMVDAAGRYIEFCKSTFPSKLSLSGLKLVVDCANGATYHIAPNVFRELGAEVIAMGVEPNGLNINDQVGATDVRALQKRVVEEHAHLGLAFDGDGDRIIMVDHLGNKVDGDQIAYIIARDALRRGELKGGVVGTLMTNLGMENGLKQLGIPFVRAAVGDRYVMEKLLEKGWKIGAENSGHVILLDKVTTGDAIVAGLQVLASVVGSEMTLHELAKGMTLYPQVLENVRFAGDNNPLEADAVKAAVSEVEAELGSKGRVLLRKSGTEPLIRVMVEGEDETLVKQSALKIAQAVKDNC

SEQ ID NO: 77109 - protein, 495 aa, Vibrio cholerae
MSKEILAVVEAVSNEKAVPRERIFEALETALATSTKKKYEIEIDVRVAIDRKTGAFETFRRWLVVENVEHPTKEISFEAASFDDDSVQLGDYIEDQIESVTFDRITTQTAKQVIVQKVREAERAQIVEQFIDNEGELVTGVVKKVNRETVILDLGNNAEAVILREDQLPRENFRPGDRVRGLLYKVAPEARGFQLFITRSKPEMLAELFRVEVPEIGEELIELKAAARDPGSRAKIAVKTNDKRIDPVGACVGMRGARVQAVSGELGGERIDIVLWDDNPAQFVINAMAPADVASIIMDEDAHSMDIAVEADNLAQAIGRNGQNVRLASQLTGWELNVMTVADLQKKHQEESMASIENFMKYLDIEQDFAELLVEEGFSTLEEIAYVPMNELLDVDGMDEDLADELRSRAKEALTTIALAKEESFEGLEPAEDLLALAGLERDMAFKLAAKGVATLEDLADQGVDDLEGIEGLTEQRAGELIMAARNICWFGEDA

SEQ ID NO: 77110 - protein, 898 aa, Vibrio cholerae
MTQITVKALSEEIGTPVDRLLEQLADAGMNKAVADHVSEDEKQKLLAHLRKEHGDATGSEPTRLTLQRKTRSTLSVNAGGGKSKNVQVEVRKKRTYVKRSSVEDEATREAEEAAMRAAEEQAKREAEEAAQRAAEEKAKREAEEAAKREAEAKRMAEEKAKRETQAATQPRSDEEKLKQEAARKEAEALKRRQEEEARRKAEEESRRQLEKVRELAEKNGERWSADKETVGDMQENTDYHVTTSRYAREAEDEADLHEEGARRRSTKANKRKMSSRDDNQERDSRPRGGKAGRKGRINKPMSMQHGFDKTAVVAKADVVVGETIVVSELAQKMSVKATEVIKVMMKMGAMATINQVIDQETAQLVAEEMGHKVVLRKENELEEAILSDRDDKFEEVSRAPVVTIMGHVDHGKTSTLDYIRRTHVASGEAGGITQHIGAYHVETPNGMITFLDTPGHAAFTAMRARGAQATDIVVLVVAADDGVMPQTVEAIQHAKAAGVPLIVAVNKIDKDTANPDNVKTELSQYNVMPEEWGGDNMFVHISAKQGTNIDGLLEAILLQAEVLELKAVKQGMASGVVIESRLDKGRGPVATVLVQSGTLRKGDIVLCGQEYGRVRAMRDEVGNEVEEAGPSIPVEILGLSGVPAAGDEATVVRDERKAREVANYRAGKFREVKLARQQKSKLENMFSNMTAGDVAELNIVLKADVQGSVEAIADSLTKLSTDEVKVNIVGSGVGGITETDAVLAAASNAIVVGFNVRADASARRMIEAENIDLRYYSIIYQLIDEVKQAMSGMLSPEFKQEIIGLAEVRDVFKSPKLGAIAGCMVTEGVIKRNAPIRVLRDNVVIYEGELESLRRFKDDVAEVKNGYECGIGVKNYNDVRVGDQIEVFETIEIQRTID

SEQ ID NO: 77111 - protein, 312 aa, Vibrio cholerae
MARRRKGRVIHGVILLDKPTGISSNDALQKVKRLYGAEKAGHTGALDPLATGMLPICLGEATKFSQFLLDSDKRYRVIAKLGERTDTSDSDGQVVQTRPVHVDYDTLLACIAKFRGETDQVPSMFSALKYQGRPLYEYARQGIEVPREARKITVYEIELHRFEGDEVEMEVHCSKGTYIRTIVDDLGEMLGCGAHVTMLRRVGVANYPYERMVTLEQLNALVEQAHRDEKAVADVLDPLLLPMDTAVEALPEVNVIPELMTLIQHGQAVQVSGAPSDGMVRITGGEQKLFLGVGEIDDNGKVAPKRLVVYGE

SEQ ID NO: 77112 - protein, 89 aa, Vibrio cholerae
MSLNAETKAAIVAEYARCENDTGSPEVQIALLTASINHLQGHFQAHKGDHHSRRGLLRMVSSRRKLLDYLKGKDLSRYQDLIKRLGLRR

SEQ ID NO: 77113 - protein, 709 aa, Vibrio cholerae
MFEKPVVKTFQYGNHTVTLETGVMARQATAAVMATMDDTAVFVSVVGKKEAVVGQDFFPLTVNYQERTYAAGKIPGGFFKREGRPSEGETLIARLIDRPIRPLFPDGFTNEVQVIATVVSVNPDVQPDIISMIGTSAALAISGLPFNGPIGAARVGHIDGQLVLNPSEKELKQSRLDLVVAGTDNAVLMVESEAQILTEEEMLAAVVFGHDQQQAVIKAINEFAAEVATPAWEWVAPAENTELKAKVAALAETRLVEAYQITEKMARYDRIHEISAEVTAALLAENEALDTKEIHTIFHDLEKTVVRRSIIAGNPRIDGREKDMVRALDVRTGVLPRTHGSALFTRGETQALVTATLGTQRDAQIIDELTGEKKDHFLLHYNFPPYCVGETGFVGSPKRREIGHGRLAKRGIAAVMPSPEEFPYTVRVVSEITESNGSSSMASVCGSSLALMDAGVPIKASVAGIAMGLVKEENDFVVLSDILGDEDHLGDMDFKVAGTATGVTALQMDIKIEGITKEIMQIALNQAKGARLHILSVMDQAISAARSDISEFAPRIHTMKISVEKIKDVIGKGGAVIRQLTEETGTTIEIEDDGTIKIAATDGDQAKEAIRRIQEITAEVEVGVIYTGKVARLADFGAFVTILPGKDGLVHISQIADKRVEKVSDYLTEGQEVQVKVLEIDRQGRVRLSMKEAVETSDAAAAEVAPQAE

SEQ ID NO: 77114 - protein, 685 aa, Vibrio cholerae
MTKFRKIHSLAFKQAKSVFLVSVLLGLCFSFYHTLSDLHQEQSKVQEHYNFKLVQSYENASQAAYHLNNLLAEQVATTLMLDPGIFKVEIVDDFGDVMTRKEKAISEQSQLVSVLASYLTPAVSVFSAELHQPNSNVVVGKLSFYIDGSSIAKVFIAKTTRVLLFDLLRNTLLTTILLLFFYQKLSRPITMLITWVNSLNDTQRSPLPLRLTHDDELSELASTFQSMWKGKELAESKLNQLAYYDSLTGLANRSLLLQKLSDAIETAQNSHSTGVLFYLDLDRFKTINDSLGHTIGDQLIKAVALRMEAWTKNDYLSARIGGDEFAVLIPYLSPAKAEEVAKQLLTLISNPYAVDDHQFYCTVSIGISVFPSVGSCNIDVLRQADTALYRAKASGRNKFMFYEPEMQAQVESFLEIEKGLHEALNQRQLELFYQPQVDEQHNIIGVEALIRWNHPKRGLLPPGVFMPIAEETGQILPIGNWIIEQACYQYAQWKKQGILPPHFRRLAINISPLQFAQESFIEQVNHALRQAGITGEPIELEITESLLLENVESAIEKMAKLKESQISISIDDFGTGYSSLRYLKHLAVDVLKIDRSFVNQLHLDDNDQAIVDTILAIARKLNLEVIAEGVEDTSELAALKKLGCNQFQGYLFDKPLRAEEIAQRFVSNSYRKIQTLPVATNSLQK

SEQ ID NO: 77115 - protein, 531 aa, Vibrio cholerae
MLMSTTPYFGEVSKRRTFAIISHPDAGKTTITEKVLLFGRAIQVAGTVKGRGSNQHAKSDWMEMEKERGISVTTSVMQFPYGDCLVNLLDTPGHEDFSEDTYRTLTAVDSCLMVIDAAKGVEDRTRKLMEVTRLRDTPIVTFMNKLDREIRDPMELMDEVENELKIACSPITWPIGCGKEFKGVYHIHRDETILYTSGQGHTIQEERIIKGLDNPELDQAVGADLAAQLREELELVLGASHEFDRELFLQGELTPVFFGTALGNFGVDHMLDGLTQWAPSPMPRQAAERVVEASEEKFTGFVFKIQANMDPKHRDRIAFVRIVSGTYKQGMKMNHVRLGKQVNISDAVTFMAGDRARAEEAFAGDIIGLHNHGTIQIGDTFTQGETLKFTGIPNFAPELFRRIRLRDPLKQKQLLKGLVQLSEEGAVQVFRPLQNNDLIVGAVGVLQFDVVVSRLKSEYNVEAIYEGVNVATARWVECDDVKKFEEFKRKNQSNLALDGGDNLAYIAPTMVNLNLAQERSPEVKFRATREH

SEQ ID NO: 77116 - protein, 437 aa, Vibrio cholerae
MKQTLKLADILALGFMLFAFFLGAGNIIFPPLAGQLAGENITPAMFGFLLTAVGLPLITIIAIAVAGGSWEHLTKDLPVKASVLMAALILIVIGPAFAAPRTGLVAYEMAVKPFFAESTQSYLTLFSVLFFAVAMFFSWSQGKLVDLIGKLLTPALFICLIILALGVFMNPQGEMIAAQGEYLSQPLTKGFLEGYNTMDTFASLMFGILIVDALRSKGITDRAATTRYLITSAVIAAIGLALVYGSLFYLGATSSSVAAGANNGGAILSQYVQALFGSYGQLVLSVIVMLACLTTAVGLISACSDFFSKHTSLSYKQWVVINGVACGVVANVGLAQLITLSIPVLFALYPVAIALVALTFVRHKLPNPRVAYRAVLSVSLLVALLDAAKVAGFDVSAFSFLPFFEYGMGWLLPTCAAMICMFFIPSASSPVLEEELA

SEQ ID NO: 77117 - protein, 512 aa, Vibrio cholerae
MQMTDAVQNEINQEQIAQEENKLIAERRSKLDHIRKNCKANGHPNSFRRDSLAGDLQKKFGEKSKEELEALNHVVSIAGRVMAKRGPFLVIQETSGRIQAYASKEVQQELKDKYQGLDIGDIIGVQGALHKSGKGDLYVNMEQFQLLTKALRPLPEKFHGLTDQEMRYRQRYVDLIVNENSRNAFIVRSKVMSAIRNFMISKQFMEVETPMMHVIPGGASARPFITHHNALDMPMYLRIAPELYLKRLVVGGFDRVFEINRNFRNEGLSPRHNPEFTMMEFYMAYADYKDLMDLTEELLSSVALEVLGSTSMPYGEHTVEFGGKYARMSMFDAIKHYNPNHAQIQALTEEDIQNRDLMVSIAKSVHVDVEPFWTCGQLLEEIFGETAEPKLMQPTFITGYPADISPLARRSDDNPFFTDRFEFFIGGREVANGFSELNDAEDQDARFKAQVEAKESGDDEAMFYDADYITALEHGLPPTAGQGIGIDRLVMLLTNTHTIRDVILFPAMRPQQ

SEQ ID NO: 77118 - protein, 352 aa, Vibrio cholerae
MALRQGSAMQYTKLPHSSLEISKICLGTMTFGEQNSQADAFQQLDYALERGVNFIDTAEMYPVPPTAQTQGKTEEFIGNWLAKSGKREKIVLATKVAGPRNVPYIRDKMALDHRNIHQAVDDSLRRLQTDYIDLYQLHWPQRQTNTFGQLNYPYPDKQEEVTLIETLEALNDLVRMGKVRYIGVSNETPWGVMSYLRLAEKHELPRIVSIQNPYNLLNRSFEVGLAEISHLEGVKLLAYSPLAFGALSGKYLNGARPAGARCTLHQRFSRYFTEQGILATEAYVALAQQFGLDPAQMALAFVNQRPFVASNIIGATTMEQLKSNLDSLDISLNAELLQKIQEIGTTYSNPCP

SEQ ID NO: 77119 - protein, 221 aa, Vibrio cholerae
MKPAPTTQQELLTRAQQIAGLSFAELADEAGMTVPPDLRKDKGWVGQLLEWHLGATAGSRPQQDFEHLGIELKSIPISYTGKPLETTFVCVAPLTGVHGLTWEQSHVRNKLSKVLWIPVQGEREIPLAERCVGSPLLWSPSPEEEAQLKADWEELMEWIVLGKVAQITAKHGEVLQLRPKAANGRALTEAYGANGRPIKALPRGFYLRTQFTAQILQRYYA

SEQ ID NO: 77120 - protein, 283 aa, Vibrio cholerae
MRQYLDLCQRIVDQGVWVENERTGKRCLTVINADLTYDVGNNQFPLVTTRKSFWKAAVAELLGYIRGYDNAADFRQLGTKTWDANANLNQAWLNNPYRKGEDDMGRVYGVQGRAWAKPDGGHIDQLKKIVDDLSRGVDDRGEILNFYNPGEFHMGCLRPCMYSHHFSLLGDTLYLNSTQRSCDVPLGLNFNMVQVYVFLALMAQITGKKPGLAYHKIVNAHIYQDQLELMRDVQLKREPFPAPQFHINPKIKTLQDLETWVTLDDFDVTGYQFHDPIQYPFSV

SEQ ID NO: 77121 - protein, 382 aa, Vibrio cholerae
MINQATSPAAPISLTTKGLRWANLAFMLYLLLLAVAMVGSGFKWATGDQAKVLFEFASHPIAGLMIGLVATALIQSSSTVTSIIVGLVAGGLPVETAIPMVMGANIGTTVTNTLVSLGHMRCKEEFRRAFASATIHDFFNLLAVLIFLPLEMMFGILEKVSHWLVSPLLATGDMSMKGFDFIKPITKPVITGLETQLSVLGNTFGGVALIVLGIATIFVAITVMGKLMKSLMVGRAREILQNAIGRGPLHGIASGTVVTVLVQSSSTTTSLMVPLVGSGVLKVREIYPFTLGANIGTCITALLAATAVSGEFAVFALQIALVHLSFNLMATVLIYGIPFLRELPIKGAELISTWACKSKMVVVSYLLGVFVVIPGSILALTA

SEQ ID NO: 77122 - protein, 108 aa, Vibrio cholerae
MPYLKGAPMNLQEMEKNSAKAVVLLKAMANERRLQILCMLLDNELSVGELSSRLELSQSALSQHLAWLRRDGLVNTRKEAQTVFYTLSSTEVKAMIELLHRLYCQANQ

SEQ ID NO: 77123 - protein, 86 aa, Vibrio cholerae
MANNKSAKKRAIQAEKRRQHNASRRSMMRTYMKKTVAAIAAGDKEAATAAFAVVTPILDRMATKGLIHKNKAARHKSRFFAAINAL

SEQ ID NO: 77124 - protein, 525 aa, Vibrio cholerae
MFEVTVSKRLLKSGIIVSAMTLISRVLGLVRDVVVANLMGAGASADVFFFANRIPNFLRRLFAEGAFSQAFVPVLTEYHASGDINKTRDLIARASGTLGVLVTIVTLIGVLGSGAVTALFGAGWFLDWLNGGPAAGKFELASLLLKITFPYLWFITFVALSGAILNTLGKFAVSSFTPVFLNVMMILCAWYLSPNLEQPEVGLAIGVFLGGLVQFLFQLPFLIKAGVLVRPKWGWKDPGVVKIRTLMIPALFGVSVSQINLLFDSFVASFLQTGSISWLYYSDRLLEFPLGLFGIAIATVILPALSRKHVDAHSDGFAHTMDWGIRMVTFLGIPAMLGLMVLAKPMLMVLFMRGEFTPSDVEQASYSLLAYSSGLLSFMLIKVLAPGYYSRQDTKTPVRYGIIAMVSNIVLNAIFAWFYGYVGLAVATSMSAFLNMALLYRGLHLQGVYHLTRKTVWFVARLAMAGAVMTGALLWQLDTMATWLSWGISQRALTLTGLIGLGVASYLAILLLLGVRLKDLKAATE

SEQ ID NO: 77125 - protein, 322 aa, Vibrio cholerae
MELIRGIHNIQSRHHGCVLTIGNFDGVHLGHQQVLSQVVQRAQQMGLPSVVMTFEPQPLELFAKQQAPARLTRLRDKFVQLSKLGVDRLLCVNFNHHFAQLDAHTFIRDLLVTRLGVKFLVVGDDFCFGKERQGNFALLQQAGQALDFEVVSTQSFCLQQLRVSSTAIREALAADQLSSASAMLGRHYSISGRVSHGQKLGRTIGFPTANIPLKRCVSPVSGVYVVEAYGLGPTPVGGVANIGNRPTVDGVRQQLEVHFFDFQGNLYGKQLEVALLHKLRDERKFASFEALKQQIELDAEAARVWLRQLKGCSVDSTQQQHV

SEQ ID NO: 77126 - protein, 949 aa, Vibrio cholerae
MSEYKDTLNLPETGFPMRGDLAKREPEMLQRWYQEDLYGAIRQAKKGKKSFVLHDGPPYANGDIHIGHALNKILKDVIIKSKTLSGFDAPYIPGWDCHGLPIELMVEKKVGKPGQKVTAAEFREKCREYAAGQVEGQKESFKRLGILGEWDKPYRTMDFVTEANIIRALGKIADNGHLLKGFKPVHWCTDCGSALAEAEVEYKNKVSPSIDVRFKAADEAAVLAKFGLAAGHEGKGDVSIVIWTTTPWTLPANRAVCLRADLEYVLIQVEGEQPERIIVASELAKSVMDRAGIEHFHNLGFATGADLELVQFQHPFYSFTVPAILGDHVTTDSGTGVVHTAPGHGQEDFAVGQQYGLEVANPVGSNGVYLPDTELFAGQHVFKANDSVLEVLKEKGALLHHHAYEHSYPHCWRHKTPIIFRATPQWFVSMEQAGLREQALTAIKGVHWMPDWGQSRIEGMVAGRPEWCISRQRTWGVPIALFVHKETAELHPNSADLIEKVAQLVEQKGIQAWWDLDTAELLGAEDAANYEKVLDTLDVWFDSGVTHSAVVDARQEFNGAEADMYLEGSDQHRGWFQSSLISSVAMKGKAPYKEVLTHGFVVDGQGRKMSKSIGNVVAPQDVTNKLGADILRLWVASTDYTGEVAVSDEILKRSADAYRRIRNTARFFLANLNGFNPTTDIIPVEDMVALDRWAVGRALAAQQEIIQAYQDYNLHAVVQRLMNFCSIEMGSFYLDVIKDRQYTAKRGGHAQRSCQTALFFIVEALVRWMAPIMSFTADEIWNAMPAQQADGSARDKFVFTTEWFDGLFGLAEGEELNNAFWNDIQKVRGSVNKLLENARNEKLIGGSLQAELVLFADDSLASKLAKLGDELRFVLLTSKAVVKPLAEKSEAAQATDIDGLFVQVNKTEAEKCDRCWHHTPDVGTIAGHTTICGRCVSNVEGEGEVRKFA

SEQ ID NO: 77127 - protein, 307 aa, Vibrio cholerae
MTNDALIAALSHLVSEGRNPDTMDIDLLSSQEIVERLNQQDKQVPLAVEAVLPQIAQAVDKITAAFKQGGRLIYLGAGTSGRLGVLDASECPPTFGVSDQMVIGLIAGGKEAMFTAQEGAEDNATLGAHDLQQIDFSSKDVLVGIAASGRTPYVIGALEYANDLGATTIALSCNPDSPIAEIAQIAISPVVGPEALTGSTRLKSGTAQKLVLNMLTTASMIRLGKSYQNLMVDVRATNRKLIARAVRIVMQATDCQREEAEALLKESHNNAKLAILMHLTGMNYEQATAKLSQSDGFLRRAMEEHEE

SEQ ID NO: 77128 - protein, 330 aa, Vibrio cholerae
MGPLWLDVAGYELSAEDREILQHPTVGGVILFGRNYHDNQQLLALNKAIRQAAKRPILIGVDQEGGRVQRFREGFSRIPPAQYYARAENGVELAEQGGWLMAAELIAHDVDLSFAPVLDMGFACKAIGNRAFGEDVQTVLKHSSAFLRGMKAVGMATTGKHFPGHGAVIADSHLETPYDERETIAQDMAIFRAQIEAGVLDAMMPAHVVYPHYDAQPASGSSYWLKQVLREELGFKGIVFSDDLSMEGAAVMGGPVERSHQALVAGCDMILICNKREAAVEVLDNLPIMEVPQAEALLKKQQFSYSELKRLERWQQASANMQRLIEQFSE

SEQ ID NO: 77129 - protein, 237 aa, Vibrio cholerae
MLSALLIDDERFAREELAELLAESGQIEVIGQASNAIEGLKKINQLKPDVVFLDIQMPQISGIELLSMLDPETMPEVVFVTAYDQYALQAFEDNAFDYLLKPVDTERLAKTVQRLLRQHKKSDYSPLTQPSLDQIPCTGLNRIVLLPINEVEFAYSDISGVNVQTAQQKATSQLTLKVLEEKTALVRCHRQYLVNLKAIREIKLLENGLAEMITHAGHKVPVSRRYLKELKEMLGFY

SEQ ID NO: 77130 - protein, 558 aa, Vibrio cholerae
MDLILSLLQQMCVYLVLAYMLSKTPIFIPLLNISGRFDHKISVYVLFSLFCIMGTYFGLQINDAIANTRAIGAVMGGLFGGPVIGFAVGLTGGLHRYTLGGFTDLACAISTTAEGLIGGLLHTYLLRKGKGKLLFSPSIVFAVTLFAEIVQMLIILVVAKPFEQSYALVSTIAAPMIIANSVGAALFMSILLDRKTIFEEYSATFSRRALNIAERSVGILAAGFNPENANKIARIVYEQTNVGAVSITDREKILAFVGIGDDHHKPNTPISSQSTLDAINRNAIIYLDGKEHPYQCSLSPTCKLGSALIIPLRAGDRVIGTIKLYEPKRKLFSTINMSMAQGIAQLLSSQILYGEYQQKQILLSRAEIKLLQAQVNPHFLFNALNTISAVIRREPDKARELILHLSQFFRSNLKQNVETVTLREELAHVNAYLTIEKARFSDRLDVEIAIDDALLERNVPSFTLQPLVENAIKHGTSNLLEAGKVRIYSEVVEGGMRVVVEDNAGLYQPPSEDYDGLGMQIVEKRLTNKFGLKSGLQIEVAPQEYTRMSFVIPQQGTY

SEQ ID NO: 77131 - protein, 555 aa, Vibrio cholerae
MAEYVYTMSRVSKIVPPKRQILKDISLSFFPGAKIGVLGLNGAGKSTLLRIMAGIDKDIDGEARPQPGLKVGYLPQEPKLDESKTVREVVEEAVADVAYALKRLDEVYAAYAEPDADFDALAKEQGELEALIQAKNGHNLDNALERAADALRLPEWDAQVKYLSGGERRRVAICRLLLENPDMLLLDEPTNHLDAESVAWLERFLVDYAGTVVAITHDRYFLDNAAGWILELDRGEGIPWQGNYTSWLEQKDARLKQEASQEKARQKTIEKELEWVRQNPKGRQAKSKARMARFEELQNTEHQKRNETNELFIPPGERLGDKVIEVKNLTKSFDGRVLIDDLSFSMPKGAIVGIIGPNGAGKSTLFKMLSGVEKPDSGTIELGDTVKLASVDQFRDSMNDKHTVFQEISEGADIIRINNFEIPARAYCSRFNFKGVDQQKVIGELSGGERNRVHLAKLLKAGGNVLLLDEPTNDLDVETLRALEEALLEFPGCAMVISHDRWFLDRIATHILDYRDEGKVNFYEGNYTEYMEWLKQTLGAQAAEPHRIKYKRITK

SEQ ID NO: 77132 - protein, 857 aa, Vibrio cholerae
MRLDRFTSKFQIAISDAQSLALGRDHQYIEPVHLMVALLDQNGSPIRPLLTMLNVDVMQLRSKLGEMLDRLPKVSGIGGDVQLSSALGSLFNLCDKVAQKRQDAYISSEIYLLAAIEDKGPLGHLLKEFGLTEKKVSEAIEKIRGGQKVNDPNAEELRQALEKFTIDLTERAEQGKLDPVIGRDDEIRRTIQVLQRRTKNNPVIIGEPGVGKTAIVEGLAQRIINNEVPEGLRGRRVLSLDMGALVAGAKYRGEFEERLKSVLNELAKEEGNIILFIDELHTMVGAGKGEGSMDAGNMLKPALARGELHCVGATTLDEYRQYIEKDPALERRFQKVLVDEPTVEDTIAILRGLKERYELHHHVEITDPAIVAAASLSHRYISDRQLPDKAIDLIDEAASSIRMQIDSKPEALDKLERKIIQLKIEQQALSNEHDEASEKRLAILNEELQEKERDYAELEEVWKAEKAALSGTQHIKAALEQARMDLEVARRAGDLNRMSELQYGRIPELEKQLDLAAQAEMQEMTLLRNKVTDAEIAEVLSKQTGIPVSKMLEAEKEKLLRMEDVLHKRVIGQKEAVEVVANAIRRSRAGLSDPNRPIGSFLFLGPTGVGKTELCKTLANFLFDSEDAMVRVDMSEFMEKHSVARLVGAPPGYVGYEEGGYLTEAVRRKPYSVILLDEVEKAHPDVFNILLQVLDDGRLTDGQGRTVDFRNTVVIMTSNLGSSRIQENFARLDYQGIKEQVMDVVSKHFRPEFLNRVDESVVFHPLGQEHIKSIASIQLARLRQRLAERDYQLEVDDEALDLIAHVGFDPVYGARPLKRAIQQNVENPLAKSILAGKFLPGSPILLSVKDGNIFASQ

SEQ ID NO: 77133 - protein, 84 aa, Vibrio cholerae
MALLITAKCTNCDMCEPECPNSAISMGDKIYEINPDLCTECKGHYDKPTCQSVCPISNCIITDPAHRETEEQLLEKFVVIQGLA

SEQ ID NO: 77134 - protein, 466 aa, Vibrio cholerae
MTTPKTFVPELLSPAGSLKNMRYAFAYGADAVYAGQPRYSLRVRNNEFNHENLQIGINEAHALGKKFYVVCNIQPHNSKLKTFIRDLKPVIDMGPDALIMSDPGLIMMVREEFPHMPIHLSVQANAVNWATVKFWASQGVERVIVSRELSLEEIEEIREKCPNTEIEVFVHGALCMAYSGRCLLSGYINKRDPNQGTCTNACRWEYKVEAAKEDEAGQIVEQFDPNAAQAIEVQNERPDTTIGAGKPIDDVVLLSESHRPDEKMAAFEDEHGTYIMNSKDLRAVQHVERLTQMGVHSLKIEGRTKSFYYCARTAQVYRKAIDDAVAGKPFDDSLMTTLESLAHRGYTEGFLRRHTHDAYQNYDYGYSVSDTQQFVGEFTGKRRGAMAEVEVKNKFVLGDSLELMTPKGNVIFTLEAMENRKGEATDDAKGNGHFVYIPVPEELDLSYALLMRNLVQGQDTRNPTGK

SEQ ID NO: 77135 - protein, 433 aa, Vibrio cholerae
MVERLTWKKLAWELAFFYLPWVVVGWIFGSMPWLLLAATALQLFWHLNHQIRLSAWLWDEKRLTPPSGTGNWESLFNGIYRLQQRHRKKRKELTNLIRRFRNGAESLPDAVVVFRSEGNIVWCNRLAQHLLGFRWPDDAGQPISNLLRTPDFIKYLKKDDFTDPLEMRSPLNSDRMLELRIVPYTEGEHLMVVRDVTQLKQLEGMRRNFFANVSHELRTPMTVLQGYLEMTEDPDVLAGPMWSKAHGVMTEQLNRMNGLVNQLLTLSKIEASPMVELDQVVDVPAMLEVLEKEAVSLSGEAQHKLHFEVDKSLKVLADEDQLRSAISNLVYNAVKYTPPGAQIDVRWYRTGKGACLEVEDKGEGIEPQHLHRLTERFYRVDKARSRDTGGSGLGLAIVKHALAHHDTHLDIYSKVGVGSKFSFVLPKRLVAKG

SEQ ID NO: 77136 - protein, 273 aa, Vibrio cholerae
MYSANPTLGYYVPPLDVNNLTDQQTAISIEHLSLYYQQSRALSDISMRIPKGQVTAFIGPSGCGKSTLLRCINRMNDLVEGTRVEGEVKLHGKNIYHPDVDVPTLRRRVGMVFQRPNPFPKSIYENVVYGLRLQGIKNSRALDDAAEQSLRAAALWDEVKHRLHENAFGLSGGQQQRLVIARAIAIEPEVLLLDEPTSALDPISTLTIEELIHDLKTKYTVVIVTHNMQQAARVSDHTAFIHMGKLIEYADTDSIFTSPLKKQTEDYITGRYG

SEQ ID NO: 77137 - protein, 207 aa, Vibrio cholerae
MLRSKKMVLVGRKAPDFTAAAVLGNGEIVDNFNFAEFTKGKKAVVFFYPLDFTFVCPSELIAFDNRYEDFLAKGVEVIGVSIDSQFSHNAWRNTAVENGGIGQVKYPLVADVKHEICKAYDVEHPEAGVAFRGSFLIDEEGMVRHQVVNDLPLGRNIDEMLRMVDALNFHQTHGEVCPAQWEAGKAGMEASPKGVAAFLSQYSADLK

SEQ ID NO: 77138 - protein, 437 aa, Vibrio cholerae
MTLTRRQQIEALEKDWATNPRWKNVKRTYTAEEVVSLRGSVVPANTIAQRGADKLWELVNGSAKKGYVNCLGALTGGQAVQQAKAGIEAIYLSGWQVAADNNTAGTMYPDQSLYPVDSVPSVVRRINNAFRRADQIQWSNGKSPQDEGGIDYFLPIVADAEAGFGGVLNAYELMKSMIEAGAAGVHFEDQLASVKKCGHMGGKVLVPTQEAVQKLIAARLAADVAGTTTLVIARTDANAADLLTSDSDPYDADFVTGERTSEGFYRVRAGIDQAISRGLAYAPYADLVWCETAKPDLEEARKFAEAIHAQYPDQLLAYNCSPSFNWEKNLDAKTIAHFQQALSDMGYKYQFITLAGIHNMWFNMFELAHAYAQGEGMRHYVEMVQRREFEAASKGYTFVAHQQEVGTGYFDKMTNTIQGGNSSVTALTGSTEEDQFH

SEQ ID NO: 77139 - protein, 352 aa, Vibrio cholerae
MQVSDFHFELPDELIARYPKAERTASRLLQLDGNSGQLVDGTFKDVLELVEPGDLLVFNNTRVIPARMFGRKASGGKLEVLVERMLDEHTILAHVRSSKPPKPGTELYLGENDEFHAVMQARHDALFEIRFTAETVVLDILNQIGHMPLPPYIDRPDEEADKERYQTVYNQKPGAVAAPTAGLHFDQALLEQIQAKGVELAYVTLHVGAGTFQPVRVENIHDHHMHAEYVEVPQEVVDAITATKARGGRVVAVGTTSVRSLESAAQDALQKGTELKPFFGDTEIFIFPGYQYQLVDCLITNFHLPESTLIMLVSAFAGYEHTMAAYEHAVKEQYRFFSYGDAMFIRKQMTKA

SEQ ID NO: 77140 - protein, 379 aa, Vibrio cholerae
MKLKFELKKKNGNARRGQLIFERGTVQTPAFMPVGTYGTVKGMTPEEVKETGAQILLGNTFHLWLRPGQEVMKMHGDLHDFMNWQGPILTDSGGFQVFSLGDIRKITEEGVHFRNPVNGDKIFMDAEKSMEIQKDLGSDIVMIFDECTPYPATHDEAKKSMEMSLRWAKRSRDHFDKLENPNNLFGIVQGGVYEDLRDVSVKGLTEIGFDGYAVGGLAVGEPKEDMHRVLEHTCPQLPEDKPRYLMGVGKPEDLVEGVRRGIDMFDCVMPTRNARNGHLFVTGGVIKIRNAAHKTDTTPLDPHCDCYTCKNYSKSYLHHLDRCNEILGARLNTIHNLRYYQRLMESIRKAIDEDRFDQFVAEFYARRNREVPPLQKDKA

SEQ ID NO: 77141 - protein, 188 aa, Vibrio cholerae
MENFQPHKQCGYGVIMRLTSKGRYAVTAMLDVALHSQQNPVPLADISERQGISLSYLEQLFSKLRKAGLVASVRGPGGGYRLGMDSYAISIGTVIAAVDESVDATKCNGKGDCQGGTRCLTHTLWRDLSSRITDFLNNITLGELMMDNEVLEVSDRQDLHLAVSQRVSQNNSNTVTIGAAPFGINVRS

SEQ ID NO: 77142 - protein, 127 aa, Vibrio cholerae
MAYSEKVIDHYENPRNVGSFDKEDPSVGSGMVGAPACGDVMRLQIKVSPEGIIEDAKFKTYGCGSAIASSSLVTEWVKGKSIDEAAAIKNSEIAEELELPPVKIHCSILAEDAIKAAVADYKKKHQH

SEQ ID NO: 77143 - protein, 393 aa, Vibrio cholerae
MHRLSQVVPLLPIIKNKSEWPSGLVLTKRLKLRMNTEQQDYNQTETTEQVNQPAIEKVAPGTLLKQKREDLGLTQRQIADRLRLRLSIIQSIEENRFEDGQVATFTRGYLRSYAKAVGIRESEILCAFDDSYCQKPEVQPDMKSFSKKTKRQLHDSRIMLITWVILAVIVGMSTLWWWQNSQKNSLIPDKTTIAPSAISDIQSSNDASLANEDFATVPPLNELQDAAPASEEAPMSQESLSGEASELTPPAPNEADVVTDKPVVEETAAAPVAPAQPQGQTPVQSQAPVAAAPVTQPEAAPSAPSQPVSSSTESASALLVMNFSADCWIQVKDATGKTLSTGVKKAGQSVSLSGQRPYKLVLGAPEGVSITLASEPVDLSGYTSGKVARLTLP

SEQ ID NO: 77144 - protein, 376 aa, Vibrio cholerae
MSMQHESPIKRRPSTRIYVGDVPIGDGAPIAVQSMTNTRTTDVAATVAQIKSLEKVGADIVRVSVPTMEAAEAFKLIKQQVSVPLVADIHFDYRIALKVAEYGVDCLRINPGNIGNEARIRSVVDCARDKGIPIRIGVNGGSLEKDLQLKYGEPTPEALVESAMRHVDILDRLNFDQFKVSVKASDVFLAVDSYRLLAKKIDQPLHLGITEAGGARAGSVKSAVGLGMLLAEGIGDTLRISLAADPVEEIKVGFDILKSLRIRSRGINFIACPSCSRQEFDVIGTVNALEQRLEDVLTPMDVSIIGCVVNGPGEAEVSHLGLAGSNKKSAFYEDGVRQKERFDNDDLVAQLEAKIRAKAARLDEKNRIDIKHVEQD

SEQ ID NO: 77145 - protein, 422 aa, Vibrio cholerae
MAKTIQAIRGMNDCLPTQSPLWQKVEGVVKNVISAYGYSEVRMPIVEMTHLFSRAIGEVTDVVEKEMYTFEDRNGDSLTLRPEGTAGCVRSGIENGLLYNQEQRLWYMGPMFRHERPQKGRYRQFHQCGVEVFGLDGPDVDAELIMMTARLWRELGIAQHVRLELNSIGSLEARANYRTALIDYLEQYQNVLDEDCKRRMYTNPLRVLDSKNPDVQAILGDAPQLSDYLDAESKQHFAGLCELLDAAGIEYTVNQRLVRGLDYYNRTVFEWITESLGSQGTVCGGGRYDGLVEQLGGKPTPAVGFAMGLERLVLMMETLGNTDVRRSVDVYMVTAGEGTMMAGMKLAEQLREQVPGLRVMTHFGGGNFKKQFKRADKVGAAIALVLGEDEVAAQTVVVKDLAGGEQNTVAQAEVAKLLAHLA

SEQ ID NO: 77146 - protein, 386 aa, Vibrio cholerae
MKKLFNQVLVAAGVLALLAGCASEEENVIMAPLPIVKSEFTPKTLWSASVGDGVGHYFSKLAPDYAYDKVFVASRDGVVKALDPQNGKVIWTTDLEIEGSARLSGGITAAFGKLFIGSENGVVNALDAETGEPLWASAIEGEVLAAPAADNNIVIVNTSRGALIALNQEDGAQKWTISTEVPNLTLRGDSRPTAVAGGVFWGTPSGRLAAAIAERGQLIWQQPVGQPKGATEIDRLVDVDASPLVIGGTLFTVGFNGQLIAIDLRSGQPIWKRNYSSATDMATDGSRLYLVTDKDHLVAVDTRSGTELWSNTQLEHRLLTAPKMIDDYLVVGDAEGYLHWIDRNSGEFIAQQLVNDSGFAVGPLALNDGYVIVTRNGQIKKLTIQQ

SEQ ID NO: 77147 - protein, 494 aa, Vibrio cholerae
MVPVVALVGRPNVGKSTLFNRLTRTRDALVADFPGLTRDRKYGQAKLGEHEFIVIDTGGIDGSEEGVETKMAQQSLAAIDEADVVLFMVDGRAGLTVADEAIAQHLRRIEKPAILVVNKVDGIDADAASAEFWQLGMDQMYQIAAAHGRGVGALIDRVLNPFAEQMESEQAQLEDLTNEEDPEEEQLEYSEEEAEAEYKRLQDLPIKLAIIGRPNVGKSTLTNRILGEERVVVYDMPGTTRDSIYIPMKRDEREYVLIDTAGVRRRKRINETVEKFSVVKTLQAIEDANVVLLVVDARENISDQDLSLLGFALNSGRSIVIAVNKWDGLSFDVKEHVKKELDRRLGFVDFARIHFISALHGTGVGHLFESVQEAYRSATTRVGTSVLTRIMKMATDDHQPPMVRGRRVKLKYAHAGGYNPPIIVIHGNQVNELPDSYKRYLMNYYRKSLEIMGTPIRIQFQNSENPFEGKTNKMTLSQERQRKRLMSMVKNRRK

SEQ ID NO: 77148 - protein, 446 aa, Vibrio cholerae
MSSSLANRNIYTVSRLNSEVRLLLENEMGIVWLVGEISNFSAPVSGHWYLTLKDSQAQVKCAMFKGNNRLVNFKPQNGQQVLVKARLSLYEPRGDYQIILESMQPEGDGRLQQQFEQLKMQLAAEGLFAQTRKKPLPENPRCVGIITSRTGAALHDILHVLKRRDPNLPVVIYPTLVQGEEAAIQIAQAIGRANTRAECDVLIVGRGGGSLEDLWCFNHEIVARTIAASEIPIISAVGHEIDVTIADFVADVRAPTPSAAAELVSRDHRHKQQALHQWQAKLASTMRHYLAQQETQFARLQHKLDKQHPQARLERQQQQLDELSLRLEQKMQQRLATQQQRWDRLSHKIELHSPIHLIRQQRFNLIQQEQRINQSIQRYLIQSRHQLALLSEKLDAVSPLATLARGYSVTRTTQGELVRQSAQVKPGDTLVTQLMDGEILSTVNSR

SEQ ID NO: 77149 - protein, 517 aa, Vibrio cholerae
MTKNIHDQRILILDFGSQYTQLVARRVREIGVYCELWSWDVEEADIREFNPDGIILSGGPESVTEANSPRAPQYVFDSGVPVFGVCYGMQTMAEQLGGRVATSDEREFGYAQVKISGESALFKDLDLTQDVWMSHGDKVVEIPADFVKIGETDTCPYAAMANEEKKYYGVQFHPEVTHTKNGLQMLENFVLGVCGCERLWTSESIIEDAVARIKEQVGNDEVILGLSGGVDSSVVAMLVHRAIGSKLTCVFVDNGLLRLNEGEQVMEMFGDKFGLNIIKVDAEERFLKALEGIDEPEAKRKTIGRVFVEVFDEESKKLSNAKWLAQGTIYPDVIESAASKTGKAHVIKSHHNVGGLPDDMKMGLVEPLRELFKDEVRKIGLELGLPYNMLYRHPFPGPGLGVRVLGEVKKEYCDLLRRADAIFIEELHAADLYNKVSQAFTVFLPVRSVGVMGDGRKYDWVVSLRAVETIDFMTAHWAHLPYEFLGKVSNRIINEVNGISRVVYDISGKPPATIEWE

SEQ ID NO: 77150 - protein, 574 aa, Vibrio cholerae
MREGLLSMFKLKHTAWWVAMACALPAQAAMNIQPDPQNPGGYLVAKADIAAAEQAKTANPMYAIWSNALATRANAIVDAIEPGLATNPDNVKRVERVFPESEWNFLTHMAAPEYTYTRFLRAIGKFPAFCAEYTDGRNSDAICKKSIVTAFAHFAQETGGHIAKDNISDNPLALEEWQQALVHVREMGWSEGQEGYTTGCGQNDWQNKKWPCATGQGYFGRGAKQLSYHFNYGAFSEAMFDGDATVLLNNPGLVADSWLNLASAIWFFLTPQAPKPAMLHVIDRTWVPSQREIDAGIGYGFGTTINIINGGIECGEQNKDKGQPVNRIRYWEGLAAHYQIPIEADEKNTCWQQLPYGSLNLNGATDVLYTNWDGNWKYYPDRPGGYSFECELVGFQTAYSALVEGDYEKCVTNLYGSHASWPKVRVVEKLDPLPTDPTDPPVGGAPAWEVGKVYNSGDKVSYKGAVYQAKWWTQGDEPSKGGPWALVSGEPTPPTEPTPSEPVPPTEPVPPSEPTPVPPTEPAPTDAIVWQPGVTKVSNGDKVTYNGQCFIAKNSPGVWESPTQSNWFWDKVSC

SEQ ID NO: 77151 - protein, 543 aa, Vibrio cholerae
MTTDFTPWPEALAAQYRQLGYWQDKTLLDYLQQSAERTPNALALVGDNQQWRYQAMLERIEQLAAGFTELGLGCGDNVVLQLGNVAEFYLCFFALLRQGIRPILALPAHRLAEIRYFCQHSQAKAYLIDGAQRPFDYQALAQELLACCPTLQTVIVRGQTRVTDPKFIELASCYSASSCQANADPNQIAFFQLSGGTTGTPKLIPRTHNDYAYSVTASVEICRFDQHTRYLCVLPAAHNFPLSSPGALGVFWAGGCVVLSQDASPQHAFKLIEQHKITVTALVPPLALLWMDHAEKSTYDLSSLHFVQVGGAKFSEAAARRLPKALGCQLQQVFGMAEGLVNYTRLDDSAELIATTQGRPISAHDQLLVVDEQGQPVASGEEGYLLTQGPYTIRGYYRADQHNQRAFNAQGFYITGDKVKLSSEGYVIVTGRAKDQINRGGEKIAAEEVENQLLHHPAVHDAALIAISDEYLGERSCAVIVLKPEQSVNTIQLKRFLHQAGLADYKIPDQIQFIDQLPKTSVGKIDKNALRRRFDTLGLALMS

SEQ ID NO: 77152 - protein, 325 aa, Vibrio cholerae
MRINITMKNIFILLSVILGCLFSGFVSAQQNVWPRTFQNADGSITTIPSQPKRILSTAVTVTGTLLAIDAPVIASAATTQSTFFEQWRKLAELRQVKKLWPAGSVDLESVYVEQPDLIVVSMIGADSARDQIPLLQAIAPTILVDYSDQTWQSLAQQLGLATGLEEQAERTIHNFEQWTKQVRDVLDLPKGRANIVSYHGPGVVNAVAKAQSAHAQLLQSVGVVLEEPDPAWQAGSIVHRDFLRIHYEHLTQLQAETTFLITMTDQQAQAFLHDPILKNLPSIQRKQVYGLGENSFRIDLFSAREIINSLLRRFAGEQAQSLVMP

SEQ ID NO: 77153 - protein, 279 aa, Vibrio cholerae
MDTIWDADLQSAALKAEHHRLKTERLSLGYEGKSVCDALDLAIPHGKFSVIVGPNGCGKSTLLKSLCRLLKPLAGQVLLDGQNIHQLPTKVVAKQLGLLPQSALTPEGIKVVDLVSRGRYPHQGLFRQWSRVDERAVEEAMRATHVHELAQHSVDQLSGGQRQRVWVAMALAQQTPYLLLDEPTTYLDIAHQIELLDLFWRLNRQQGHTLVAVLHDLNQACRYADHLIVLQEGKIVAQGDPHSLVTPALVKQVFGIDCVVMPDPISCTPLIIPYSLKRG

SEQ ID NO: 77154 - protein, 516 aa, Vibrio cholerae
MQSFVDFLNGIIWSPALIYLCLGAGLFYSVLTRFVQVRHFFEMWRLLLNNKESSKGISSFQALAVSLSGRVGTGNIAGVAAAIGFGGPGAVFWMWMVAFFGAATAYAESTLAQIYKEEDNGEFRGGPAYYIEKAMGQKWYAWVFAIATIFACGVLLPGVQSNSIGNAVESAFGSGPMIETALGTFSFAKIFTGTVISILLGFIIFGGVKRIASFTQIVVPFMALAYIITAFVIILLNIGEVPRIIAMIVGDAFSPMAGVGAAIGWGVKRGVYSNEAGQGTGPHAAAAASVEHPAQQGLVQSFSIYIDTLMVCSATAFMILITGAYNVHGAAEGMFLVQNLPADIIASSPAFTQIAVDSALPGIGKPFVAFALFFFAFTTILAYYYIAETNVAYIRRTFKVDGLMFVLKLVLMASVFYGTVKTANLAWALGDVGVGLMAWLNIVGIIIIFFMSKPTMAALKDYEDQQKQGVTEFTFNPVKLGIKGATYWEGKYLRKTGKAPTAEVKETQRVEQTSSL

SEQ ID NO: 77155 - protein, 296 aa, Vibrio cholerae
  MISC_FEATURE (91)..(91): X=any amino acid
MEPAIMTKLRRSMLFVPGANAAMLSNTFIYQPDSIMFDLEDSVALREKDTARMLVFHALQHPMYQEMETVVRVNPLDSEFGIKDLNAVVRXGAKVVRLPKTDNANDVIEMEKVIEQIERACGREVGSTRMLAAIESAQGINNAVEIAFSSRRLIGIALGAEDYVRDLRTQRSAEGIELLFARCSILQAARAAGIMAFDTVYSDANNEEGFLREAEHIKQLGFDGKSLINPRQIDLLHNVFAPTQKEVDHAIAVIEAAEEAAAKGLGVVSLNGKMVDGPIIERARWTLQRAESGIKH

SEQ ID NO: 77156 - protein, 534 aa, Vibrio cholerae
MAPSSNAHVGHCNVLNPASNTKGHLMSINTLNNPLSVLEVERYALTPYTQARAITPHLHDEQAKKSRKVKSSIREAIVDLGLKDGMTISFHHAFRGGDKTVNLVMEVIAELGIKNLTLASSSLTSCHSPLIEHIKNGVVSKIYTSGIRGALADSISNGLLDEPVHIHSHGGRVHLIQSGELYIDMAFIGVPCCDEFGNANGFKGKSNCGSLGYAKVDAEHAEKVVMLTEAIVGFPNFPASITQDRVDAVVQVAEVGDPSKIGGDATRMTTNPRELLIAKRAAEVIEHSGYFYDGFSMQTGSGGASLAVARFLKEKMLRQDIRASFALGGITATMVDMHEQGLIDYLLDVQCFDSVAAGSLARNPHHLEISANEYANPSSKGAAVDRLDVVILSALEIDTQFNVNVITGSDGVIRGASGGHCDTAAAANLSIIVAPLVRGRIPTVVEKVTNVITPGSTIDVLVTDQGIAVNPNRPELKARFIEAQLPVVEIEALQQRAELLTGKPQPLQFEDKTVAFVHYRDGSIIDVIKQVKSL

SEQ ID NO: 77157 - protein, 257 aa, Vibrio cholerae
MHYNSPAFISDSTMISKTQLKLIRALGQKKQRKAHGLFLVQGEKNVLELTNSTLKVQHIFATAEFLAEHAQALAGFECIEATLDDLTKVSTLVSNNAAIAVVAIPHIEVPKAQGLMIALDGVSDPGNLGTIIRVADWYGISHIIASQDCADPYNPKTISATMGSFGRVQVSQVDLPDYLAKANLPVYGAFLEGVSVHQTAFQAEGILLMGSESHGIREQAAQYVTDKITIPAFGGAESLNVAMATGIILDNIRRQHS

SEQ ID NO: 77158 - protein, 541 aa, Vibrio cholerae
MKFQYDFVFLNQFSCKKLISFYRIIFPSKKVAVFYMIYPIPNSETSTVHFKDVYDNYIGGQWMKPHSGEYFSNTSPVNGLVFCRVARSSSQDVELALDAAHNALESWSTTSAVERSNILLRIADRIESNLETLAIVESWDNGKPIRETLAADLPLTIDHFRYFAACIRSQEGAASELDSRTLTYHLPEPIGVVGQIIPWNFPLLMAAWKLAPALAAGCTVVLKPAEQTPVSILFLMEIIGDLIPAGVINVVNGFGSEAGNALATSQRIDKLAFTGSTEIGNHILKCAADNLIPSTIELGGKSPNIYFPDIFSHEDQYLDKCIEGALLAFFNQGEVCTCPSRILVHESIYEKFIAKIIERVALIKQGNPLDTETQIGAQVSKEQYDKILGYIQIGKDEGAELIFGGHPNNQENYLSGGYYIKPTLFFGHNQMHIFQEEIFGPVIAITKFKDEIEALHLANDTVYGLGAGVWTRDINIAHRMAKNIKAGRVWVNCYHAYPAHAAFGGYKKSGIGRETHKLTLSHYQNIKNVLISHEIHPLGLF

SEQ ID NO: 77159 - protein, 276 aa, Vibrio cholerae
MIGKKSFQTNVYRMSKFDTYIFNNLYINDYKMFWIDSGIAKLIDKNCLVSYEINSSSIILLKKNSIQRFSLTSLSDENINVSVITISDSFIRSLKSYILGDLMIRNLYSENKDLLLWNCEHNDIAVLSEVVNGFREINYSDEFLKVFFSGFFSKVEKKYNSIFITDDLDAMEKISCLVKSDITRNWRWADICGELRTNRMILKKELESRGVKFRELINSIRISYSISLMKTGEFKIKQIAYQSGFASVSYFSTVFKSTMNVAPSEYLFMLTGVAEK

SEQ ID NO: 77160 - protein, 302 aa, Vibrio cholerae
MNKTLRITLLSISGSKTFNIKFRHRVFLHLTFCFIMLFFLAIAMLIFNFDMKLSSSLLSQIKNEYKTFFLENKISSINSSSSELMEDLFSKQERYELAINRLERLESFVHSAESIDMVTVTEQLGSYMKETVLNEIPNGFPIPDAKISSRYGERVHPVTKVKQIHHGIDFPAAIGTPIYSPADGVVEAIRVSTQGSGNFMRLQHTYGFSSSYSHLHKFSVKEGDFVKKGELIAYSGNTGLSSGPHLHYEIRFLGKSLDPHPFIKWNYDNFSEITNKVPLIKWDELLTNIEIRIAMNPNLNAQ

SEQ ID NO: 77161 - protein, 161 aa, Vibrio cholerae
MTKKKTNTKAGSNTIALNKKARHEYFIEDEFEAGMELQGWEVKSLRQGKANIAESYVYIKDGEAFISGMTIIPLQQASTHVVANPTRIRKLLLSRRELDNLFGRINREGMTLTALSLYWSRSWVKIKIGVAKGKKLHDKREDLKEKEWQRQKDRVMKSALR

SEQ ID NO: 77162 - protein, 294 aa, Vibrio cholerae
MKKPFNVLAIIGKPRDQQAIQTHKEIYHWLRSLGYTVFIDDRLREILTDLPTEHFASLIELGKKADLAIVVGGDGNMLGAARVLSRFDISVIGVNRGNLGFLTDLNPEDFQQRLQEVLDGHYLQETRFLLEAEIHRHGQVKSHNAALNEAVLHPGKIAHMIEFEVYIDDNFAFSQRSDGLIVSTPTGSTAYSLSGGGPILSPSLNAITLVPMFPHTLSCRPLVVGGNQRIKLVVSPENRGTQEVSCDGQVSLPVSPGDEIHIYQSPNVLKLIHPQDYSYYHVLRTKLGWSSKLF

SEQ ID NO: 77163 - protein, 635 aa, Vibrio cholerae
MGKIIGIDLGTTNSCVAVLDGDKPRVIENAEGERTTPSVIAYTDGETLVGQPAKRQAVTNPQNTLFAIKRLIGRRFEDEEVQRDIKIMPYKIVKADNGDAWVEAKGQKMAAPQVSAEVLKKMKKTAEDFLGEPVTAAVITVPAYFNDAQRQATKDAGRIAGLEVKRIINEPTAAALAYGLDKQGGDRTIAVYDLGGGTFDISIIEIDEVEGEKTFEVLSTNGDTHLGGEDFDNRMINYLVDEFKKDQGIDLRNDPLAMQRLKEAAEKAKIELSSAQQTDVNLPYITADATGPKHMNIKVTRAKLEALVEDLVQRSLEPLKVALADADLSVNDITDVILVGGQTRMPMVQKKVAEFFGKEPRKDVNPDEAVAVGAAVQGGVLAGEVKDVLLLDVTPLSLGIETMGGVMTKLIEKNTTIPTKANQVFSTAEDNQSAVTIHVLQGERKQAMYNKSLGQFNLEGINPAPRGMPQIEVIFDLDADGILHVSAKDKQTGKEQKITIQASGGLSDAEIEKMVQEAEANKEADKKFEELATARNQADQMIHATRKQITEAGEALPADEKAKIETAINELETAKKGEDKAEIDAKVQALMAAAQKLMEIAQQQAQAQGANAGQSSAKEDDVVDAEFEEVNDDKK

SEQ ID NO: 77164 - protein, 184 aa, Vibrio cholerae
MIHHPLTVCKGFWEMHRGFTLLELLITVAVLTTMLLFAAPNFSKVSQQTKMTNLANELQGFLIQAKSEAVFRNQDLWVHIQGLPSITGQWQLVLSSVSDVAAIDASNTVALLQGQRYQNVFVSKTNTLTEVKFDHVMGNPQEAGSLFIKPSESAADSIKVTVHNRAGRIKVCTENEAKYGFEKC

SEQ ID NO: 77165 - protein, 530 aa, Vibrio cholerae
MTPFAYKLPIRALWLGLLSLLLVGCQIDSEPKSELEKIRERGVLRVGTLNNPLSYYIGPDGPTGLDYELAREFAKELGVKLEMKPAYRLSSLFPALKNGEVDIIAAGLSQSEERLKDFRAGPAYYYVSQQVVYKKGDWRPRSFKQLVERQQTLLKDNPELAFFSVVDDSHFEHTLLAKQQKYPDFQFHVDSNSDVNDLLKKVSQGELLFTMADSVEVSLSQRIYPELAAAFELTEDQPISWFIRRSDDESLYALMIEFFGNLKQSGYLASLEEKYIGHIGAFDYVDTRAFIRALDTRLPRWTPLFQKYSAEFDWRLVAALAYQESHWNPYAKSPTGVRGLMMLTLPTARSVGVSDRLDPEQSIRGGVEYLRRMMERVPDSISEHEKIWFALASYNIGYGHMMDARRLTKSQGADPDSWADVKDRLPQLQQKKYFTQTRYGYARGDEARNYVENIRRYYQSIIGHLEQRQLATGDESIEDLTVIALDEEFFNEEANREILDEEAEALESESLENSESSAEPSAKPSTESKN

SEQ ID NO: 77166 - protein, 1297 aa, Vibrio cholerae
MRILRGSPALSEFRVNKLLTACREQQLPVTGIYAEFMHFADLKAELNPQELEKLEKLLTYGPTIQEHEPQGLLLLVTPRPGTISPWSSKATDIAHNCGLHGIKRLERGTAYYVEAETALTAAQIATLEALLHDRMMEVVFAELTDAQQLFSVAEPAPMSQVDVLAGGRRALEEANVSLGLALAEDEIDYLVESFTKLGRNPNDIELMMFAQANSEHCRHKIFNADWTIDGVKQDKSLFKMIKNTFEQTPDYVLSAYKDNAAVMTGSTVGRFFPDPESRQYTYHHEDAHILMKVETHNHPTAISPWPGASTGSGGEIRDEGATGIGGKPKAGLVGFTTSNLRIPGFEQPWESDFGKPSRIVNALDIMLEGPLGGAAFNNEFGRPNLLGYFRTYEEKVTSHAGEEVRGYHKPIMIAGGMGNIRAEHIQKKEIPVGAKLIVLGGPAMNIGLGGGAASSMASGQSAEDLDFASVQRENPEMERRCQEVIDRCWQLGDKNPIAFIHDVGAGGISNALPELVNDGDRGGKFQLRNVPNDEPGMSPLEIWCNESQERYVLAVAAEDMPLFDAICQRERAPYAVVGEATEERHLTLEDSHFANTPIDMPMDILLGKPPKMHREASTLKVSSPALERSGIELNEAVDRVLRLPAVAEKTFLITIGDRSVTGLVARDQMVGPWQVPVANCAVTAASFDSYHGEAMSMGERTPVALLDFGASARLAVGEAITNIAATDIGELKRIKLSANWMSPAGHPGEDAGLYEAVKAVGEELCPALGITIPVGKDSMSMKTKWQENGEQKEVTSPLSLIITAFARVEDIRKTVTPQLRTDLGETSLILIDLGNGQNRLGATALAQVYKQLGDKPADVDNAAQLKGFFDAVQTLVRNDKLVAYHDKGDGGLLVTLAEMAFAGHCGIKANIETLGDDALAALFNEELGAVVQVKNDELNAVLATLAAHGLEACAHVIGEVEASDRLLITCGEEVLIERSRTELRTIWAEMTHKMQALRDNSACADQEFAAKQDNRDPGLNAKLTYDVQADVAAPYIAKGVRPKMAILREQGVNSHVEMAAAFDRAGFDAVDVHMSDILTGQTVLDAYQGLVACGGFSYGDVLGAGEGWAKSILFNAQAREQFEQFFQRKDTFSLGVCNGCQMLSNLRDLIPGAELWPRFVRNESDRFEARFSLVEVQKSPSLFFSEMAGSRMPIAVSHGEGRVEVRDAQHLAAIEQSGTVAIRFVDNFGQPTQAYPSNPNGSPNAITGLTTQDGRVTIMMPHPERVFRTVANSWHPDNWGENGAWMRMFQNARKYFG

SEQ ID NO: 77167 - protein, 571 aa, Vibrio cholerae
MRTSNYLLSTLKETPNDAEVVSHKLMLRAGMIRKLASGLYTWLPTGLRVLRKVENIVRQEIDNAGAIETLMPVVQPFELWEETGRSEKMGPELLRFTDRHERPFVLSPTAEEVITALVRNEVSSYKQLPLNLYQIQTKFRDERRPRFGVMRAREFCMMDAYSFDIDKAGLEKSYEAMHVAYCKAFDRMGLDYRPVLADTGAIGGNGSHEFHVLAESGEDLIAFSTESDYAANIEKAEAVAPAIERPAPTQAMTLVDTPNAKTIAELVEQHGLPIEKTVKTLFVKASDEIDAPIVALIIRGDHELNEIKAEKLAEVASPLEMASEEEIRALIGAGPGSLGPVGLKLPFIVDRTVAVMNDFGAGANIDGKHYFGINWGRDVELGKVEDLRNVVEGDPSPCGKGTLMLKRGIEVGHIFQLGTNYSEKMNCGVLDSNGKNVILEMGCYGIGVSRVVAAAIEQNHDDYGIIWPDAIAPFQVAIVPMNMHKSERVQQAAEKLYAELTAAGIEVLFDDRKERPGVMFSDMELIGVPHTIIIGDRSMDEGHFEYKNRRQGEKEAVAMESIIDFIQAKLA

SEQ ID NO: 77168 - protein, 231 aa, Vibrio cholerae
MYPIEPIAIIESPYQEKFAVPRQPRLVPSATARVKLLGECNCAESIRGIEQFSHVWLLFLFDQNLAAGWKPTVRPPRLGGNERVGVFASRATFRPNGIGMSAVELKGVSKEGDQYYLELGSVDLVNGTPIIDIKPYIPYSDSITDAQGGYAEQEPQRMAVTFSDAARQMLQAHPEGKIRQAVIREVLAQDPRPAYKKHRADDKLYAVNLYDWNVKFTVNAEAIVVNAIEPF

SEQ ID NO: 77169 - protein, 85 aa, Vibrio cholerae
MKAGIHPDYRKVVFHDTTVDHYFVVGSTLQTDRTIEWEGKTYPYITIEVSSESHPFYTGKQRVVQKEGRVANFTRRFGQFAKESK

SEQ ID NO: 77170 - protein, 534 aa, Vibrio cholerae
MTRREQMSSSASINQNAPKKPLITRFLDGVEYLGNLLPHPITLFAIFCVVLLVASGIAGYFELSVVDPRPEGAKGRAADGMIHVVSLLNADGLELIVTNLVKNFVGFAPLGTVLVAMLGVAIAEHSGLLSAAMRGLVMGASKRMVTFTVVFAGIISNTASELGYVVLIPLAAMLFHSLGRHPLAGLAAAFAGVSGGYSANLLIGTVDPLLSGITETAARMIDPTYSVGPEVNWYFMAASTFVIAILGAFVTEKIVEPKLGKYDVSEASDDLSQDKMGSLTALEKKALAYAGLAVVVVSALLAWTIVPADGVLRGEDGLVSGSPFLKSIVAFIFIFFAIPGYVYGRVVGTMKTDRDVINAMAKSMSSMGMYIVLVFFAAQFVAFFSWTKFGQVLAVLGADFLKDIGLTGPMLFFAFILMCGYINLMIGSASAQWAVTAPIFVPMLMLVGYAPEVIQAAYRIGDSVTNIITPMMSYFGLILAVATRYMKNLGIGTLIATMLPYSVVFMVGWSLLFYVWVFVLGLPVGPGAATYYTP

SEQ ID NO: 77171 - protein, 626 aa, Vibrio cholerae
MTLDISKYPTLALANTPDELRSLPKEVLPKLCDELRTYLLNSVSQSSGHLASGLGTVELTVALHYVYHTPFDHLIWDVGHQAYPHKILTGRRDQMPTIRQKDGLHPFPWREESEYDTLSVGHSSTSISAALGMAICAGKEGKDRKVVSVIGDGAITAGMAFEAMNHAGDVHPDMLVVLNDNEMSISENVGALNNHLAQVLSGSLYTSIREGGKKVLSGIPPIKELVRRTEEHLKGMVVPGTLFEELGFNYIGPVDGHDVLELIKTLKNMRELKGPQFLHVMTKKGKGYAPAEKDPIGYHGVPKFDPSHHSLPKSSNTKPTFSKIFGDFLCDMAAQDPKLMAITPAMREGSGMVRFSKEYPSQYFDVAIAEQHAVTLATGMAIAGYHPIVAIYSTFLQRGYDQLIHDVAIMNLPVMFAIDRAGIVGADGQTHQGAFDLSYMRCIPNMLIMAPADENECRQMLYTGHQHQGPSAVRYPRGNGMGVELESSFTALEIGKGRLMRESTACEGEKVAILSFGTLLPNALQAAEKLNATVADMRFVKPLDEALIKQLAQTHDVLVTLEENAIAGGAGAGVIEFLMKEKQLKPVLNLGLPDQFIVQGTQEEMHAELGLDGAGIERAIRDYLAK

SEQ ID NO: 77172 - protein, 294 aa, Vibrio cholerae
MIEALSSYQQRNNQQLDQWLNRIPFQTLPLIEAMRYGLLLGGKRARPYLVYITGQMLGCELSDLDTPASAVECIHAYSLIHDDLPAMDDDELRRGKPTCHIQFDEATAILTGDALQTLAFTILAEGDLSAAGETQRVAMLQALAEASGAQGMCLGQALDLAAENRLISLEELETIHRNKTGALMRCAIRLGALAAGEKGRAMLPHLDRYAEAVGLAFQVQDDILDIISDTETLGKPQGSDQELNKSTYPALLGLEGAQQKAHTLLQEALLALEAIPYNTEHLEEFARYVVERKN

SEQ ID NO: 77173 - protein, 318 aa, Vibrio cholerae
MDDEQQCKCPPPGLPAWLGTFADLMSLLMCFFVLLLSFSEMDVLKFKQIAGSMKFAFGVQNRLEVKDIPKGTSIIAQEFRPGRPEPTPIDVIMQQTIDITQQTLEFQEGESDRAGGNQRDSGQLTGGQSAETSVQDNQNTQSEMQQQQAQAMSEQMETVAESIKKALSREIEQGAIEVENLGQQIDIRIREKGAFPEGSAFLQPKFRPLVRQIAELVKDIPGKVRVTGHTDNQKLDSELYRSNWDLSAQRAVSVAQEMEKVKDFDHLRLQVRGLADTQPLGPNDTEAQRATNRRVEISILQGDPVYSDEVPSLGGGQQ

SEQ ID NO: 77174 - protein, 275 aa, Vibrio cholerae
MNKEFIMKFSLKSLLTIAAAASTLILAGCGEKAVDNNKVKIGVMAGAEAQVAEVAAKVAKEKYNLDVELVTFTDYVTPNAALDDGSIDANAFQHKPYLDKQIADRGYKLAIVGNTFVYPIAGYSKQIKSVDELQDGARIAVPNDPTNLGRSLLLLQQQGLLKLREDVGLLATVRDIVENPKKLEILELDAAQLPRSLDDVALSIINTTYASSINLTPEKDGIFVENKESPYVNILVAREANVNAENVQNFKKAYQTDEVAKAASEIFQGGAVKGW

SEQ ID NO: 77175 - protein, 225 aa, Vibrio cholerae
MSFNTIAQWFALNSDLLLTATWQTLYMVAIAGAVGFALGIPLGVILHTTKKEGLLENLPLNRALGAVVNIGRSVPFLVLMVAIIPVTKLIVGTFIGTTAAIVPLTIGAIPFVARLIESALLEVPTGLVEAAQSMGATPLQIIRKVLLPEALPTILNSVTITLVTLVSYSAMAGTVGGGGLGDVAIRYGFHRYDITIMAVTVVMLIVLVQIIQSIGDALVRRVDHR

SEQ ID NO: 77176 - protein, 316 aa, Vibrio cholerae
MNRKLTILDIARLSGVGKSTVSRVLTNDPKVKPETRAKVEQVIAESGYVPSKSAQTMRGGSQKVVGIIISRLDSPSENKAVSTMLQAFYAHGYDVVIMESQFSREKTNAHLKVLAKRQVDGVIVFGFTDIDHDALLSWQHRCVLLAMHSDEISSINYDNAGVIERALQHLAQKQLRDIAFIGVDPRDKTTGEQRLNAYLNWCVEHEIVANYQTGQLHHESAYLLVDKVLTEQTQAIVCASDTLALGVIKRLQELQRDDVVVTGVGGNELLSFLFPNIFSVDPGYREAGKLAADLLIEQLCGSDHGCVHLTQMPVSR

SEQ ID NO: 77177 - protein, 352 aa, Vibrio cholerae
MNKNTVLSLTLLTLLMNSAVLSAKEPNQPPAISVVTESVQSQQISQSLSVVGKLKAEQSVDIAAEVAGKVDMIAVQANQQVKKGQILIKLDDDKAQAALVEAKAYLQDEQRKLTEYERLLKRNAITPTEIDAQRARVEIGQARLNAAQANLADLHITAPFDGTVGFIDFSRGKWVSAGSELLTLDNLSLMRLDLQIPERYLPQLSKGMKVQGSSEAWPNVQFEGSVVAVDSRINQETLNLRVRVHFPNPDQRLKPGMLMSARIHFPAISAPIIPVQALEYSGTKRFVYVIGEDNVAKRREVSLGARVENQVVIEKGLQIGEKIVVQGIVNMRDNARVSEVTVEGRPLKKDDK

SEQ ID NO: 77178 - protein, 1036 aa, Vibrio cholerae
MWLSDVSVKRPVAALVLSMLLCVFGVVSFTKLAVREMPDIESPVVSVSTRYQGASATIIESQITSVLEDQLAGISGIDEITSVSRNGMSRITVTFELGYDLNTGVSDIRDAVARAQRSLPEEADDPQVFKNNGSGQASVYINLSSSEMDRTQLTDYIERVLLDRFSLISGVSSVDVSGGLYKVMYVRIKPELMAGRGVATSDISDALNKENLESPGGQVRNDSTVMSVRTARGYQSAEDFEYLVVKRASDGTPIYLKDVADVFIGAENENSTFKSDGIVNVSMGIVPQSDANPLEVAKRVHEEVDKVQQFLPKGTRLAIDYDSTVFIERSISEVYSTLFITGGLVILVLYIFIGQLRATLIPAVTVPVSLISAFMAAYYFGFSINLITLMALILSIGLVVDDAIVVVENIFHHIERGEKPLLAAYKGTREVGFAVIATTLVLVMVFLPISFMDGMVGLLFTEFSVLLAMAVIFSSLIALTLTPVLGSKLLKANVKPGRFNQLIDRLFARLESGYRQVVSRAIRWRWAAPVVIAACIGGSYGLMQLVPAQLTPSEDRGVIFSFVRGADATSYNRMAANMDLVEQRLMPLLGQGFLKSFSIQSPAFGGNAGDQTGFVIMILEDWNDRTVTAQEALSQVRKALAGIPDVRVFPFMPGFRGGSNEPVQFVLGGSDYSELKTWAEKLEEEAEKSPFMTGADIDYSEKTPELVVTIDKQRAAELGISVKSISDTLEVMLGGKKVTTFVERGEEYDVYLRGDENSFNNAADLSQIYMRTATGELVTLDTVTRIDEVASAIRLAHYNKQKSVTITANLEAGYTLGQALDFLDQKAQEILPNDISVSYSGESKDFKENQSSVAIVFALALLVAYLVLAAQFESFINPLVVMLTVPMGVFGGFLGLFVMGQGMNIYSQIGMIMLIGMVTKNGILIVEFANQLRDRGVEFEKAIIDASARRLRPILMTAFTTLAGSIPLIVSTGAGYESRIAVGTVIFFGMGFATLVTLLVIPAMYRLISGSTQAPGHVEAELNHELQQDVKGRAQH

SEQ ID NO: 77179 - protein, 166 aa, Vibrio cholerae
MKVKGLSVLVVCTGNLCRSPMAEIILRDKIRQKRLNIQVRSAGTLKTGKTMPDDKALQALQDYGYHPMVNPVQQVTQQDFIEHDFIYAMDRTNLADLLDICPAEHKNKLALFLSKANRQEKEVPDPYRRSSEFFQRTALLIESGAVALVDSWQEQGINACNENLSQ

SEQ ID NO: 77180 - protein, 372 aa, Vibrio cholerae
MKKVLIVFGTRPEAIKMAPLVQQLCQDNRFVAKVCVTGQHREMLDQVLELFSITPDFDLNIMEPGQTLNGVTSKILLGMQQVLSSEQPDVVLVHGDTATTFAASLAAYYQQIPVGHVEAGLRTGNIYSPWPEEGNRKLTAALTQYHFAPTDTSRANLLQENYNAENIFVTGNTVIDALLAVREKIHTDMDLQATLESQFPMLDASKKLILVTGHRRESFGGGFERICQALITTAEQHPECQILYPVHLNPNVREPVNKLLKGVSNIVLIEPQQYLPFVYLMDRAHIILTDSGGIQEEAPSLGKPVLVMRETTERPEAVAAGTVKLVGTNQQQICDALSLLLTDPQAYQAMSQAHNPYGDGKACQRIADILAK

SEQ ID NO: 77181 - protein, 143 aa, Vibrio cholerae
MWLYRVGHFFHKRRIPLLPQVCNGLIRLVHNCAVYSQSEIGKGTVFGYGGIAVVIHKRCVIGKECVIGSNVTIGGRSRSHNVPVIGNYVYIATGAKVLGDIRVGDGAVIGANAVVLEDVPPYSVVVGMPAKVIKTNINPKDFY

SEQ ID NO: 77182 - protein, 446 aa, Vibrio cholerae
MFTSSLYVKAPIWLQNVMLSVRALSRQMVRENGEMRAVLQEIQANEFSRTHLADYQHKQLKKTLENARNHVPFYQDLEVPNLELEAFPYLDKSVLRRDHKQFISQNKPSVVVKGATSGTTGTPLTILQDRHSVIREQAFVARQLAWAGYRKGDKRAWIRGDMVVPLSQKQGPFWRYSWFEQMIVLSSFHLTPKTMSSYLQAMVDFGVEVIQAYPSSIATLARYLEANQSYYPAKLKSIMTSSESLSAEDRQVIETRFGCKVFDWYGLFERVAAIGQCEHGRYHLLSDYSHVELLAAGDGRYELVGTNFNNQYFPLIRYKTGDHVHLSENEACPCGRVFPVIERIEGRIGDYLVGEDGQKVHILNHIPKGIAGIMACQFVQSERGQIVVKVVADAEQFNQEQQKQLISNTQARLGSSLNVTIDIVSALERTANGKIRQAICTIKDVQ

SEQ ID NO: 77183 - protein, 250 aa, Vibrio cholerae
MRNNRLKRINFLGSPMDVASMSETVALIRDRILRQEFTQHVVVNVAKLVNMRKDPELAQSVTECDIINIDGMGVVWGARFLGHQVPERVAGVDLFLELNAMAAQEQMPVFYLGAKQEIVEKTAAVMQAKHPQLVIAGYHHGYFWDDEQAIVEKIRQSGAKLLFVAITSPKKENFINRWQEQLGVLFVMGVGGTFDVVAGHVSRAPLWMQKAGLEWLYRVLQEPGRMWKRYLITNSRYAWLLLNEKIKPKN

SEQ ID NO: 77184 - protein, 271 aa, Vibrio cholerae
MSNFKGSIMNKRHYYLASCLALLFSTASYAEVDCELQPVIEANLSLNQNQLASNGGYISSQLGIRNESCETVKFKYWLSIKGPEGIYFPAKAVVGVDTAQQESDALTDGRMLNVTRGFWVPEYMADGKYTVSLQVVAENGKVFKANQEFVKGVDLNSLPELNGLTIDIKNQFGINSVESTGGFVPFTVDLNNGREGEANVEFWMTAVGPDGLIIPVNAREKWVIASGDTYSKVRGINFDKSYPAGEYTINAQVVDIVSGERVEQSMTVVKK

SEQ ID NO: 77185 - protein, 737 aa, Vibrio cholerae
MTGKQFTQEEVIDIRQYFNVLLNYKWRILLFSVMVTAITLLFVLSMRSEYTARATILIESTQAKAVSIEEVYGLDTKSQEYYLTQIEILKSDTIAQEVIERLDLASDPEFDLSPESDASPSLKERLVEWMPFLQGFKQEETVADPDLEAYRQNRLILYKFKRGMEISPIRKTQLVNIYYTAGDPKLAAKIANEIARVYMDSHLEAKLEVELKANTWLNTRMEELRTQLRESEAKLQAFLQAEGLVDVQGVEGLATQELEELTSQMNKARDRRVAAETLYQVANSYSKNDSDLTALSSIPEISNHPTIRDLKVAEVDAERKVSEFSKRYGPKHPKLKSASAQLEAVRKNLRAELRQLLNGINNELQAAKQSERSLQTEFNQRKSEFQTLTVKNAKYSELKREVQTNRELFDLFLARQKETSASGDFNTTIARFTDQASAPLTPSKPNKKLIVLLAFVVSFGFACVVAFIADAMTDTFADIKQVEKQLALSLLGVVPVVRKQRGKLDAKAYFDEKLRELTEAVRTIRTSYLLAHVNQDQHVVMLTSCLPGEGKTTSSLNLALSLAQMEKTLLIDCDLRKPAIAHRFGISGSQPGVTNLLNGTQSLEDCVYHDEQSGLDILTAGVYASNPLELLSSSKFSELLADLRTRYQRIVIDTPPCLAVSDSFMLAQYVDSVILVIDANHTRTPVVREVVGKLTQQGSRIDGVILNRLNAKKASRYSGYYHYQAYYGEETKSGAAK

SEQ ID NO: 77186 - protein, 321 aa, Vibrio cholerae
MSKPIQMERGVKYRDADKMALIPIKNMPTEQKEVLRKPEWMKIKLPADSQRIQDIKAAMRKNNLHSVCEEASCPNLAECFNHGTATFMILGAICTRRCPFCDVAHGRPNAPEAEEPKKLAQTIHDMKLKYVVITSVDRDDLRDGGAQHFADCNREIRALNPHIKIETLVPDFRGRMEVALEALKDNPPDVFNHNLETAPRLYRKVRPGANYKWSLELLRQFKEQHPHVPTKSGLMMGLGETKEEIVEVLKDLRAHGVTMLTLGQYLAPSRHHLPVERYVPPAEFDELKEVALELGFTHAACGPFVRSSYHADLQAKGLEVK

SEQ ID NO: 77187 - protein, 156 aa, Vibrio cholerae
MKIQLIAVGTKMPKWVEEGFQEYRRRFPHDMPLELVEITAGKRGKNADIARILQKEGEAMLAAVPKGNRIVTLDIPGKRWDTEELAVQLESWKLDGRDVSILIGGPEGLAPACKAAADQSWSLSPLTLPHPLVRVVMAESLYRAWSITTNHPYHRE

SEQ ID NO: 77188 - protein, 894 aa, Vibrio cholerae
MAAGLAIVVTPCFLYSMPNRKTSFLLNSQIPRWMSSMQEQYNPQDIEHKVQQHWDNNKTFVVSEDPNKEKFYCLSMFPYPSGRLHMGHVRNYTIGDVVSRFQRLQGKNVLQPIGWDAFGLPAENAAVKNNTAPAPWTYENIEYMKNQLKLLGFGYDWNREFATCRPEYYRWEQEFFTKLFAKGLVYKKTSSVNWCPNDQTVLANEQVEDGCCWRCDTPVEQKEIPQWFIKITAYAQELLDDLDNLDGWPEMVKTMQRNWIGRSEGVELKFAVKGENTDLEVYTTRPDTLMGVTYVGIAAGHPLATKAAANNPALAAFIDECKNTKVAEAEIATMEKKGMATGLTAIHPLNGREVPIYIANFVLMDYGTGAVMAVPAHDQRDFEFATKYGLDIIPVIKPADGSELDVSEAAYTEKGVLFASGEFDGLDFQAAFNAIAAKLEAEGKGKKTVNFRLRDWGVSRQRYWGAPIPMVTTEDGQVHPVPADQLPVILPEDVVMDGVTSPIKADKEWAKTTFNGEPALRETDTFDTFMESSWYYARYCSPQADDILDPEKANYWLPVDQYIGGIEHACMHLLYSRFFHKLLRDAGYVKSDEPFKKLLCQGMVLADAFYYTNDKGGKEWVSPTEVKVERDGKGRIVSAVDATGRQVEHSGMIKMSKSKNNGIDPQEMVDKYGADTVRLFMMFASPADMTLEWQESGVEGANRFLRRVWKLVREHTELGQAPALDASALNADQKALRRDVHKTIAKVTDDVARRQTFNTAIAAIMELMNKLTKAPMTEAQDRAILDEALKAITLMLYPITPHICFEMWVALGQSNIDTASWPTYDEAALVEDEKLIVLQVNGKLRGKLTVAADATQQQVEALGMQDENVQKFIDGLTVRKVIYVPGKLLNIVAN

SEQ ID NO: 77189 - protein, 505 aa, Vibrio cholerae
MNSVLSHRLMRPLAAAFVGVITPLAFAPYQFWPLALLSPFILLLLLHQQSAKRAALIAYLWGIGQFAVGISWVHVSIDTFGGMPKIASLFLMTLLVGYLALYPSLFGWLLNRLFPNNSRSKWLCAAPALWLITDWLRGWVMTGFPWLWLGYSQIDSPLANFAPIGGVELITLLLLFCAGSLAYAVLNRRWLMACIPLVVYATGYGLQAMQWVTPQTERTASLALIQGNIEQGLKWLPSQRWPTIMKYTDLTRENWDADVIIWPEAAIPAFEYEISSFLHNLDAAARMNQSAVITGIINQSDDKQYFNSVLTVGDTPHGEYRYDLTQRYHKYHLLPFGEFVPFEEILRPLAPFFNLPMSSFSQGAYVQPNLIAKGFAFVTALCYEIIFNEQVRDNVTPDTDFLLTLSNDAWFGRSIGPLQHMEIARMRALELGKPLIRATNNGVTAVTDERGRIMAQLPQFETGVLKATVTPTRGSTPYFLWGTTPLYLWVGLAAGFAFWRQRRAR

SEQ ID NO: 77190 - protein, 291 aa, Vibrio cholerae
MNEDNSQNSEGPSRKSFFERLSQLFQGEPKDRQELVDVIRDSEVNDLIDHDTRDMLEGVMEIAEMRVRDIMIPRSQMVTIDRTHNLDALVAIMTDAQHSRYPVISEDKDHVEGILLAKDLLKYLGSNCAPFNIQEVIRPAVVVPESKRVDRLLKEFREERYHMAIVVDEFGGVSGLVTIEDILEEIVGDIEDEFDDEEQKDIRQLSKHTFSVKALTTIEDFNHTFGTKFSDEEVDTVGGLVMTAFGHLPARGEVVDIAGYNFKVTAADSRRVVALQVTVPDLEALSHVAEE

SEQ ID NO: 77191 - protein, 397 aa, Vibrio cholerae
MKRKYWVGKGMSGNKFDILVVGGGMVGAAAALGFARQGRKVAVIDSGAPHAFEPSQPMDVRVSAISQTSVGLLEELGAWSSVVGMRACPYRHLETWEHPECRTRFSCESLGLPQLGYMVENRVIQLALWQQFAAYPQLTLMCPEQLAQLNVSAEGCRVTLQSGAEIECDWVIGADGANSQVRNLVRIGVTAWDYRQHCMLINVQTEQIQQETTWQQFFPTGPRSYLPLGGNQASLVWYDTPQRIRKLSGLNPEQLRSEILQYFPAELGNIKVLQHGAFPLTRRHAQQYVKNRCILIGDAAHTINPLAGQGVNLGFKDVAVLLAQTQEQALNQASFERYERCRRPDNLLMQTGMDLFYKTFSNSFTPVRFVRNVALALAERSGPLKTQVLRYALGFSN

SEQ ID NO: 77192 - protein, 573 aa, Vibrio cholerae
MISGILASPGIAIGKALLLQEDEIVLNTNTISDDQVEAEVERFYTARDKSSAQLEVIKQKALETFGEEKEAIFEGHIMLLEDEELEEEILALIKKEKMSADNAIHTVIEEQATALESLDDEYLKERATDIRDIGTRFVKNALGMHIVSLSEIDQEVVLVAYDLTPSETAQINLNYVLGFACDIGGRTSHTSIMARSLELPAIVGTNDITKKVKNGDTLILDAMNNKIIVNPTQAQIEEAKAVKAAFLAEKEELAKLKDLPAETLDGHRVEVCGNIGTVKDCDGIIRNGGEGVGLYRTEFLFMDRDALPTEEEQYQAYKEVAEAMNGQAVIIRTMDIGGDKDLPYMDLPKEMNPFLGWRAVRISLDRREILRDQLRGILRASAHGKLRVMFPMIISVEEIRELKNAIEEYKAELRTEGHAFDENIEIGVMVETPAAAAIAHHLAKEVSFFSIGTNDLTQYTLAVDRGNEMISHLYNPLSPAVLTVIKQVIDASHAEGKWTGMCGELAGDERATLLLLGMGLDEFSMSGISIPKVKKVIRNANYAEIKAMAEEALALPTAAEIEACVDKFIAAKA

SEQ ID NO: 77193 - protein, 85 aa, Vibrio cholerae
MYEKQVEITAENGLHTRPAAQFVKEAKAFDADITVTSNGKSASAKSLFKLQTLGLVKGTVVTISAEGPQAKEAVEHLVALMDQLH

SEQ ID NO: 77194 - protein, 322 aa, Vibrio cholerae
MSKIYEDNSLTIGNTPLVRLNKVSNGKVLAKIEARNPSFSVKCRIGANMIWEAEKQGKLKPGVELVEPTSGNTGVALAFVAAARGYKLTLTMPESMSLERRKLLKALGANLELTEAAKGMKGAIAKAEEIVASNPEKYLLLQQFNNPANPQIHEKTTGPEIWDATDGQIDVFVAGVGTGGTLTGTSRYIKGTQGKAILSVAVEPAESPVITQALAGEEIKPAPHKIQGIGAGFIPGNLDLSLIDRVERVTSDEAIEMARRLMEEEGILAGISSGAAVVAANRIAQLPEFEGKTIVTVLPSSGERYLSTALFAGIFTDKENQQ

SEQ ID NO: 77195 - protein, 291 aa, Vibrio cholerae
MQELRFVLIIVGALAIAALLFHGLWTSKKEGKSKFGDKPLRKMKVESDDPPSRAFAAEDDFEIIRKERKEPDFGIPNQQHDPLISDFAAHDELDEEEDEEARIPVQPQSQPQPRKVQPQVEMPRVAPNVPMAKVQPEVVTEIEVQEPQEEKLDVIVLNVHCAGNQPFIGTKLFDSMQQNGLLFGEMDIFHRHADLSGTGKVLFSVANMMQPGTLMHDDPADFSTKGISFFMTLPCFGDPEQNFKLMLKTAQQIADDLGGHVLDDARNLMTPNRLDAYRKQIQEFKVRAAQA

SEQ ID NO: 77196 - protein, 669 aa, Vibrio cholerae
MSDVAQRLTELRKTLHEHGVRYYVEDAPSIPDAEYDRLMRELLELEAAHPELMSSDSPSLRVGGRPLDAFESVVHEIPMLSLDNAFDDGELESFYRRMTDRIPAVQHSAFCCEPKLDGLAVSLLYENGVLTRAATRGDGTTGENITENVRTIKSIPLRLQGADFPTRLEVRGEVFMPKAGFEALNARALKKGEKQFVNPRNAAAGSLRQLDSKITAQRPLAFYAYSVGVIEGGELATSHYQRFLQLKGWGLPICPETKLVTSLAEVKAFYQDILQRRQSLAYEIDGVVIKVDDIQLQERLGFVARAPRWAIAYKFPAQEELTLLNDVEFQVGRTGAITPVAKLEPVFVGGVTVSNATLHNADEIERLGVMVGDTVVIRRAGDVIPQIVSVVLERRPENAKSIVFPTRCPVCQSDVERVEGEAVARCSGGLICQAQRKEALKHFVSRKAMDVEGLGDKVIEQLVDREMVSTPADLFRLRAGELTILERMGPKSAQNVIDALNKAKQTTLPKFLYALGIREVGEATALNLAQHFLSLEAIQQASLEQFIEVPDVGVVVASHLQAFFAQDRNQQVINELLEQGITWPALTAAPVAVDSALAGKIVVLTGSFTQLSRNDAKAALQALGAKVTGSVSKNTDMVFAGEAAGSKLAKATELGIQVFDEQALIEFLK

SEQ ID NO: 77197 - protein, 271 aa, Vibrio cholerae
MMNLFKTTILFSTITMAVGCSNLDSSSVFNDVAKNVKERHNYVQVVAKDITPDAKAIVGPDIVKAELSYVGNFPKAEGVNIENSYVDMNVTYFKNYDQYDTVAYSSQKLKVETYRPLAETCTEHCTTSQWFKFPLSQEYIQQLNSDSVVFTLSSSTDKNQVEFTVPKAYFLAVINEAKFVLQGTDVAPVAPIVAVQAQPTASKPNEMIQYLFGEASSAERQEFANWAFANRAEVAQPMVTQNKLVEMMADWYKKADKAEKASILSWLISQE

SEQ ID NO: 77198 - protein, 139 aa, Vibrio cholerae
MNISQIAKLTSLTAKSIRLYEEKGLIIPPLRSESGYRTYTQQHVDDLLLIARCRRVGFSLDECKAMLTLANDPNRTSAAVRARAQEKWQEISRKLSELTMIKQQLEEWIASCPGDQGSDCPIIEQLKGHCCSNNKTKTP

SEQ ID NO: 77199 - protein, 635 aa, Vibrio cholerae
MSETATTNKETRGFQSEVKQLLHLMIHSLYSNKEIFLRELISNASDAVDKLRFQALSHPDLYQGDAELGVKLSFDKDKNTLTISDNGIGMTRDEVIENLGTIAKSGTAEFFSKLSQEQSKNSQLIGQFGVGFYSAFIVADAVTVRTRAAGSAPADAVQWYSKGEGEYTVETINKESRGTDIILHLREEGKEFLSEWRLRDVISKYSDHIGIPVYIQTSVMDEEGKATEETKWEQINKAQALWTRAKSEVTDEEYKEFYKHVSHDFADPLVWSHNKVEGKNDYTSLLYIPAKAPWDLFNREHKHGLKLYVQRVFIMDDAAQFMPSYLRFVRGLIDSNDLPLNVSREILQDNKITQSLRQACTKRVLTMLERMASNDADNYQKFWKEFGLVMKEGPAEDFANREKIASLLRFASTHIDSAEQTISLASYVERMKEGQDKIYYLTADSYTAAKNSPHLEQFKSKGIEVILMFDRIDEWLMNYLPEFEGKAFQSITKAGLDLSQFEDEAEKEKHKETEEQFKSVVERLKGYLGSRVKEVRTTFKLANTPAVVVTDDYEMGTQMAKLLAAAGQPVPEVKYILEVNPEHALVKRMADEADEQTFGRWAEVLLGQAMLAERGSMEDPSQFLGAVNQLLAPSH

SEQ ID NO: 77200 - protein, 214 aa, Vibrio cholerae
MRIILLGAPGAGKGTQAQFIMEKFGIPQISTGDMLRAAIKAGTELGKQAKAVIDAGQLVSDDIILGLIKERIAQADCEKGFLLDGFPRTIPQADGLKEMGINVDYVIEFDVADDVIVERMAGRRAHLPSGRTYHVVYNPPKVEGKDDVTGEDLVIREDDKEETVRARLNVYHTQTAPLIEYYGKEAAAGKTQYLKFDGTKQVSEVSADIAKALA

SEQ ID NO: 77201 - protein, 554 aa, Vibrio cholerae
MCSIFGILDIKTDAATLRPIALEMSKKLRHRGPDWSGIYASDKAILAHERLAIVGLNSGAQPLYSPDRKLILAVNGEIYNHKEIRERYKGQYEFQTDSDCEVILALYRDKGADLLEELNGIFAFVLYDEEKDEYLIGRDHIGIIPLYQGHDEHGNFYVASEMKALVPVCKTLSEFPPGSYLSSKDQAVTRYYVRDWNSFDEVKDNVSSKEELTQALEAAVKRQLMTDVPYGVLLSGGLDSSITSAIAKRFAAMRIEDDEKSAAWWPQLHSFAIGLEGAPDLKAAREVAEKIGTVHHEMTYTIQEGLDAIRDVIYHIETYDVTTIRASTPMFLMGRKIKAMGIKMVLSGEGADEIFGGYLYFHKAPNAKEFHEETVRKLLALNLFDCARANKSLAAWGVEGRVPFLDKEFIDVAMRLNPADKMCGNGKMEKHILRECFEHYLPESIAWRQKEQFSDGVGYGWIDTLKATAEAKISDQQMETAKFRFPYNTPTTKEGYVYREIFEELFPLESAARCVPGGPSVACSSAKAIEWDESFKNCIDPSGRAVKAVHKQAY

SEQ ID NO: 77202 - protein, 404 aa, Vibrio cholerae
MNGGQIGNVDLVKQLNSAAVYRLIDQQGPISRIQVADVSQLAPASVTKITRQLLERGLIKEVAQQASTGGRRAISLTTEVKPFHSIAVRIGRDYIQLSLYDLGGNSLVDEHHEFHYNTQDVLMSSLIKQIKQFIQQHTALIDQLIAIGVALPGLVNPETGVVEYMPNVAINELPLGATIRDEFHVECFVGNDVRGIALAEHYFGASQDCQDSILVSVHRGTGAGIIVNGQVFLGYNRNVGEIGHIQIDPLGEQCQCGNFGCLETVATNPAITSRVQKLIAQGYESSLSTLDTITIDDVCEHANAGDELAKQALVRVGNQLGKAIAITVNLFNPQKIVIAGQITAAKEIVFPAIQRNVENQSLKTFHQHLPIVSSQVYKQPTMGAFAMIKRAMLNGVLLQKLLED

SEQ ID NO: 77203 - protein, 378 aa, Vibrio cholerae
MYALTNCKIYTGNDVLVKHAVIINGDKIEAVCPIESLPSEMNVVDLNGANLSPGFIDLQLNGCGGVMFNDEITAETIDTMHKANLKSGCTSFLPTLITSSDENMRQAIAAAREYQAKYPNQSLGLHLEGPYLNVMKKGIHSVDFIRPSDDTMIDTICANSDVIAKVTLAPENNKPEHIEKLVKAGIVVSIGHTNATYSEARKSFESGITFATHLFNAMTPMVGREPGVVGAIYDTPEVYAGIIADGFHVDYANIRIAHKIKGEKLVLVTDATAPAGAEMDYFIFVGKKVYYRDGKCVDENGTLGGSALTMIEAVQNTVEHVGIALDEALRMATLYPAKAIGVDEKLGRIKKGMIANLTVFDRDFNVKATVVNGQYEQN

SEQ ID NO: 77204 - protein, 523 aa, Vibrio cholerae
MNILGYAQKLGKALMLPIATLPVAALLLRLGQPDLLGIPFMAAAGDAIFSQLPLLFGLGIAIGLSKDGSGAAGLAGAVAYFVLSATAKTIDASINMSFFGGIFAGIIAGHSYNAFHTTRLPEWLAFFAGKRLVPIMAGLFALVAGALSGVIWPSIQGGLDALAHAVSTSGALGQFVYGTLNRALIPVGLHHVLNSYFWFGMGTCQEILVSGAQAAGQALPALEKLCVDPALAKTLVVGQEHTFAFKNAVTPEITAVVKEVTEVVKSGDLHRFFGGDKSAGVFMNGFFPVMMFGLPGAALAMYLAAPAERRHQVGGALFSVAFCSFLTGITEPLEFMFVFLAPALYAMHAVFTGLSLVVANMFGTLHGFGFSAGLIDFLLNWGLATKPATLFVIGLAFFALYFFTFTFAIRAFNLKSPGREDEEVETETDSADASKGDLARQYLKALGGHENLTSIDACITRLRLTLKDRSVADEAVLKKLGAKGVVKLGENNLQVILGPLAEIVAGEMKAISPKEDLSDVKLP

SEQ ID NO: 77205 - protein, 556 aa, Vibrio cholerae
MSEAEARPSNFIRQIIDKDLADGKHTTVHTRFPPEPNGYLHIGHAKSICLNFGIAQDYQGQCNLRFDDTNPEKENLEYVESIKKDVTWLGFDWSGEVCYSSDYFDKLYEYAIELIQKGLAYVDELTPEQIREYRGTLTEPGKHSPYRDRSVEENLALFEKMRAGEFAEGQACLRAKIDMASSFIVMRDPVLYRVRFAEHHQTGDKWCIYPMYDFTHCISDALEGITHSICTLEFQDNRRLYDWVLDNITIPCHPRQYEFSRLNLEYTVMSKRKLNQLVTEKLVTGWDDPRMPTISGLRRRGFTPSAIREFCKRIGVTKQENMIEYSALESCIRDDLNENAPRAMAVLDPVKLVIENFAAGTVETLTLANHPNKPEMGDREVPFTRELWIEREDFREEANKKYKRLVLGKEVRLRGAYVIKAERIEKDEQGNITTIFCSYDPETLGKNPADGRKVKGVIHWVSAEKGVPAEFRLYERLFTVPNPGAADNFAETINPESLVKVQGYVEPSLVEAKPEFGYQFERMGYFCADNKDSSPQALVFNRTVGLRDSFAKIDEE

SEQ ID NO: 77206 - protein, 308 aa, Vibrio cholerae
MSWLEKILEKSNIVSSRKASIPEGVWTKCTSCEQVLYYAELERNLEVCPKCDHHMRMKARRRLETFLDQGERVELGEELEPQDKLKFKDSKRYKERLAAAQKASGEKDALVVMKGAVLGVPVVACAFEFSFMGGSMGSVVGARFVRAVEAAIEHNCGLICFSASGGARMQEALMSLMQMAKTSAALERLSDKGLPFISVMTDPTMGGVSASLAMLGDINIGEPKALIGFAGRRVIEQTVREELPEGFQRSEFLLEHGAIDMIVDRRDMRQRVASLLAKMTGQASPLVVSVNDAPNEVPYAVPEANKKG

SEQ ID NO: 77207 - protein, 296 aa, Vibrio cholerae
MSLYENKKVVAIGGGHGLGRMLAALKVFGSNATGIVTTTDNGGSTGRIRHCQGGIAWGDTRNCINQLITEPSISSMMFEYRFKGAGELNGHNLGNLMLTALDNLSVRPLDAINLIRNMLKVDVNILPMSEHPSDLAALAMDGKWVTGETSVDEMTQDLRRLDLAPEVPATKEAVTAIQDADCVILGPGSFLTSVMPPLLLPELGKAIARNQTAKVIFVENLSPEYGPAGRMSLEQKLEWCERACQGRKIDVVLGHHPHPELEQRWNFVTRDLASANRDWRHDRQKLRQAIEEQLMN

SEQ ID NO: 77208 - protein, 334 aa, Vibrio cholerae
MERCSVAQQFEDRFQRKFYYLRLSITDVCNFKCTYCLPDGYKPSAGRPASFLTVNEIRRVVSAFAHCGTSKVRITGGEPSLRKDFGEIIHTIAQTPGIQKVATTTNGYRLAKHIGEWREAGLTQLNVSVDSLDPRMFAQITGENRFQQVMSGIDRAFEVGFEQVKVNVVLMKNLNHLELPQFMAWIKTRPIQLRFIELMQTGEMDALFARHHVSGISIRDYLFGNGWLLKARADNDGPAQVFIHPDFQGEIGLIMPYEKDFCRSCNRLRVSALGKLHLCLFGEQGIELRDLLQDDHQENALIERIQTQLQNKAETHFLHDGNSGVTPHLASIGG

SEQ ID NO: 77209 - protein, 170 aa, Vibrio cholerae
MGHAESKFQAANIAVLTVSDTRTEENDTSGRYLAEQLQEAGHTLADKQIVIDDMYKIRAVVSQWIADETIQAILITGGTGFTSRDSTPEALKPLFDKEVEGFGELFRMVSFEEIGTSTIQSRAVAGFANHTVIFAMPGSTGACRTGWTKIIKQQLDASHRPCNFMPHLTV

SEQ ID NO: 77210 - protein, 731 aa, Vibrio cholerae
MPMLPPLKEQLNPEKDRGINCCAPWRDCVLRVVLSLQFGLYQEKRILSMANDPRKLLVTCALPYANGSIHLGHMLEHIQADIWVRYQRLRGNTVNFICADDAHGTPIMLKAQQMGMTPEAMIEMVSEEHQRDFAGFDISFDNYHSTHSDENRELASHIYLQLKKNGFISSRTISQLFDPEKEMFLPDRFVKGTCPKCKSEDQYGDNCDACGETYSPTELINPKSAVSGATPVMKDSEHFFFDLPQFESMLKEWTRSGSLQSETANKMQEWFEGGLQQWDISRDAPYFGFEIPGEKDKFFYVWLDAPIGYMGSFKNLCDKRGDLDFNEYWNKDSKTELYHFIGKDIVYFHSLFWPAMLDGSGFRKPTNVFVHGYVTVNGAKMSKSKGTFVKASTYLNHLDPECLRYYYAAKLNNRIDDLDLNLEDFTQRVNADVVNKIVNLASRNAGFITKRFDGKLSAHFAEPELYAEFAGAADRIAELFEAREFGRAIREITALADKANQYVDEKAPWVVAKQEGQDQALQDICTVGINLFRVLMTYLKPVMPALAERTEAFLNQELTWEGVATPLTDHAVTPFKALFNRIDPKQVEAMIEASKAEAAAEKAAADAAKPKSAETELSKDPLAAEIEFDDFAKVDLRIAKILSCEAVEKSDKLLKFELDIGGETRQVFSGIKSAYQPEDLIGKYTVVVANLKPRKMKFGMSEGMILAAGPGGSDLWLLEPHQGAQAGMRVM

SEQ ID NO: 77211 - protein, 703 aa, Vibrio cholerae
MKKLFISLLGLVVLIVGALLALVLLVNPNQFKPLIVEQAKKQTGLDLVIEGDIGWQFFPSIGFELGKTELKNPQGFASPNLFKVESVGIDVSVMPLLDKQLKIGNIRLDGAEFHLETLKDGRSNLDALTQAQSKPASAPATTDSAPASQPSSSEPAAAWSIELGGVSVSNAVLEITDKKAGSHTKLYDVQLSVAEFVPDNWTKATFAAKGDKDQQKFAAQGEAEVRLSADFKQYALRNINLDASFSDPSNQIDSAKLKLDTFEFDKANALTFSVAGKAADMKLNAQGSASLMVNQAISKVGLDALKLQAELEGAALPQSPMKLSLDSQIAFDLTQNHLSVLLNKLTANALSFDGKADVTLADIPKVRFNLHSPEIDLDAFLGTKAQESQPAPAKEAAASSSSAPATNAPAEVEPDLSALKALDVAGEISIDKFKASNAHLQNVKANFAVNRGVVDLKSFTANLYQGSVQASAQVDARKTPATYSVKKQIKGVQVKPLLKDVLNNEMLEGTGNIDVNVQGQSLTPSGIQKNLVGTVAINFADGAVKGINVAHLIRTHYAKIKGQNVEEADAVKKTDFSAMTTTLKLNKGEVTTNDLNMQSPLLRIHGEGKANYLQQNVDFLVRTSIVGTLEGQGGKSLDELRDVTIPINISGAWSDPKFRLVFDDVLKQKAKKEVDRGVEKLTDKIKDEDTKKAVDGLLKGLFN

SEQ ID NO: 77212 - protein, 155 aa, Vibrio cholerae
MQKVLVVCMGNICRSPTAEAVLRAKAAQLKVDVEIDSAGTIGYHQGNPPDARSKAAGEKRGYSFSGIKARKIRDEDFVKFDWILAADKENLAELKARCPQSHQHKLSLMLSHSDSEYQEIPDPYYGGERGFELVLDLVEDAAEQFLLKLKQQGQR

SEQ ID NO: 77213 - protein, 484 aa, Vibrio cholerae
MQKILPTPVCQCFSSRKDCLNHDYLNGCLICLTFSLQCARSDLLFEGEIMGKQEVRTRSGERVAIVAGLRTPFARQSTEFGQVPAVDLGKMVVQEMMARTAIDPKLIEQVVFGQVVQMPEAPNIAREIVLGTGMSINTDAYSVTRACATSFQAAVNVAESIMAGSIDIGIAGGADSSSVLPIGVSKKLAASLLALSKTKTVGQKLKLLSNLSFKDLMPVPPAVAEYSTGLSMGQTAEQMAKSYAISRAEQDALAHRSHTLAAQAWAEGKIRDEVMTAFPEPYKKWLDMDNNIRMDSKLESYAKLRPAFDRQYGSVTAANSTPLTDGAAAIMLMREGKAKELGLEIMGYIRSYAFAAIGVEKDMLMGPSYATPIALDRAGITLNDLTLIDMHEAFAAQTLANLKMFASDKFAQEQLGRAQAIGEVDMSKFNVLGGSLAYGHPFAATGARMITQTLRELKRRGGGLALNTACAAGGLGAAMILEVE

SEQ ID NO: 77214 - protein, 724 aa, Vibrio cholerae
MCCGWLRRCYDSGGGIMDNNNAFQLSFDEQHYAWLAIDVPGEKMNTLQAAFAEEMQAVFATLNEKRGQIKGLIIHSLKPDNFIAGADVRMLEACQSVHEAQALASQGQQMFQQLADLPFPVVAAIHGPCLGGGLELALACDYRVCTEDEVTRLGLPEVMLGLLPGSGGTQRLPRLIGLLPALDLILTGKQLRAKKAKKLGVVDACVPHSVLLDVAKRLLEEKGHKKRAQVTLPIKEKLLANTDLGRKLIFDQAAKKTQQKTRGNYPAAQAILEVIQYGLEKGMHAGLEYEAKRFAELVMTRESKALRSIFFATTEMKKDLGADAKPAPVAAVGVLGGGLMGAGISHVTVAKAKTSVRIKDVANDGVLNALNYNYKLFDKQRQRKILTKAQLQAQMSQLSGGTGFVGFDRCDVVIEAVFEDLKLKQQMVADIEANAKPTTIFATNTSSLPIHQIASQAQRPQNIVGLHYFSPVEKMPLVEVIPHATTSDETIATVVTLARKQGKTPIVVKDCAGFYVNRILAPYMNEAAQVLMAGEPIEKLDAALLDFGFPVGPITLLDEVGVDIGAKIMPILVKELGPRFQGPDVFDVLLKDNRKGRKSGKGFYTYKGSKKKEVDKSVYKLLKLTPESKLNDKEIAMRCLLPMLNEAVRCLDEGIIRSARDGDMGAIFGIGFPPFLGGPFRYMDTLGLTKVVEMMNQHTEKYGERFAPCDGLLTRAGLGEKFYP

SEQ ID NO: 77215 - protein, 182 aa, Vibrio cholerae
MEALDLLLNRRSIAKLDAPAPQNEALDNILRAGLRAPDHGALTPWRFVVAQGEGLAKLAAILEQAEIANGSDEAVISKAKNAPFRAPMVITVIAKVTHSEKIPAFEQHLSAGCAVQAMQMAAIAQGFQGIWRSGSWMFHPVVRRAFNVQGEDHIVGFLYLGTPGTTAAKVPERELSKYVEYL

SEQ ID NO: 77216 - protein, 692 aa, Vibrio cholerae
MSYLALARKWRPTRFSEVVGQSHVLTALENALAQNRLHHAYLFSGTRGVGKTTIGRLFAKGLNCETGITATPCGQCATCQEIDQGRFVDLLEIDAASRTKVEDTRELLDNVQYKPARGRFKVYLIDEVHMLSRHSFNALLKTLEEPPEYVKFLLATTDPQKLPVTILSRCLQFHLKPISVENIQQQLDKVLHAEQISSDSKALNLLAHAADGSMRDALSLTDQAIALGNGVVKSDIVAHMLGTLDTDHSLHLLQAISLQTPQAVMDCIETLAQNGVEWDGLLQQLSTQLHRIAMYQALPATLDKSLPEASRIESLAKTLAPQDVQLYYQIALKGRQDLPLSPTARIGIEMLMLRMMAFRPSHVSLASVIVPPNTAVTAPTIAAPTSQMAAAAPQPQPVAQSNVSQSASQAMPHPVAPPMMAAQPVVESAVPVTQREASHSINAPEASVVTNTDTQSQASMPALAGLRHQLRSKRQEVQNKGADGKKSDATSATPASALERIAQRAQQVQVSPERNDEDELEPEEEIYQWRPMQPIEVAVKSEVTPTQLKKALEHEKTPEMGAKLIEEAVAQDAWSALVQRLETAKMVEQLALNSAFVRQGDQISLTLRPSHAHLHNEKAQQELEQALNHVLGEACSLNITVGQEGETPLELRERLYQQKLTSALHSLQTDPNVQFIERRFNAQLDSDSVRPI

SEQ ID NO: 77217 - protein, 120 aa, Vibrio cholerae
MKHSTITREIKMFGKGGMGNLMKQAQQMQERMQKLQEEIANMEVTGESGAGLVKVTVTGSHSVRRVNIDESLMEDDKEMLEDLIAAAFNDAARRIEETQKEKMASITGGMQLPPGMKMPF

SEQ ID NO: 77218 - protein, 200 aa, Vibrio cholerae
MRTSHMLEHLMEALRCLPGVGPKSAQRMAFHLLQRDRKGGLQLAEALSQAMVEIGHCQECRTFTEQDVCHICSNPKRKENGQLCVVESPADIAALEATGQFSGRYFVLMGHLSPLDGIGPSDIGLDTLDYRLQRGDISEVILATNPTVEGEATAQYIAELCREHQVTASRIAHGVPVGGELELVDGTTLSHSLLGRHKLF

SEQ ID NO: 77219 - protein, 247 aa, Vibrio cholerae
MNYSVSTDALKEKVILVTGAGDGIGKQAAISFAAHGATVILLGRTVKKLEQTYDAIEAAGYPTPAIVPLDMKGATKQNYLDMVDTIEDQFGRLDGVLHNASLLGVLSPFDQIGEDSFDEVMQVNVKAQFLMTQALLPLLHKSADARIVFTTSTVGHIGRAFWATYAISKFATEGMMQILADELSESTIRVNAINPGGTRTAMRAKAYPAEDADKLKTPLDIMPLYLYLMAPEGREVHGQCIDAQPKK

SEQ ID NO: 77220 - protein, 143 aa, Vibrio cholerae
MKKVLLIVISILFGSVLVGCQMNESNKTQDKIQSITGSVAYRERIALPDNAVVTVYLQDVSLADAPATVIAKQNFITNGMQVPLEFNLAYDSRKIKASHRYSVSARIEVDGKLRFITDTHYGVITDPEATKHVPMMLIGVHGE

SEQ ID NO: 77221 - protein, 113 aa, Vibrio cholerae
MLPHQFFKLLADETRVRCLLMIAREEKVCVAELTEALNESQPKISRHLALLRASGVVVDIRQGQWVFYRISDQLPGWMRKQIQGLVESNCLKQEYQQDIQRLAEMTSRPQCCV

SEQ ID NO: 77222 - protein, 324 aa, Vibrio cholerae
MMSLLDVKDLRVEFSTQDGIVTAVNDLNFSLKQGETLGIVGESGSGKSQTVFAIMGLLAKNGKITGSAKFEGKEILNLPERELNKVRAEQIAMIFQDPMTSLNPYMKVSDQLMEVLMLHKGMGKAEAFEESVRMLEAVKIPEARKRITMYPHEFSGGMRQRVMIAMALLCRPKLLIADEPTTALDVTVQAQIMELLNELKREFNTAIIMITHDLGVVAGSCDKVLVMYAGRTMEYGSVNDIFYNPSHPYAEGLLSAIPRLDTEGEVLPTIPGNPPNLLRLPVGCPYQERCHRVTDRCKREAPILLPFGNSRQRACFSDWEAWTK

SEQ ID NO: 77223 - protein, 336 aa, Vibrio cholerae
MGGLDKMSVEKKLLLDVKDLKVHFNITPKSAWPWTKPVTLKAVDGVNVRLYEGETLGVVGESGCGKSTFARAIIGLVQATHGEVVWLGQDLTRMQEVKRRATRKQIQMIFQDPLASLNPRMTVGDIIAEPLQTFYPELSKQEVKDRVKEMMAKVGLLPNVINRYPHEFSGGQCQRIGIARALILKPKMIICDEPVSALDVSIQAQVVNLLKELQKELGLSLVFIAHDLSVVKHISDRVLVMYLGNAVELGVSKELFANPKHPYTKALMSAVPIPDPNIERNKTIQMLEGDLPSPMNPPSGCVFRTRCPQATAECAKTKPVIKGSDIHSVSCLYAEA

SEQ ID NO: 77224 - protein, 315 aa, Vibrio cholerae
MGKLIKGKWHDVWYDTKQHDGEFIREDAGFRDWVKATPDAQFAAESGRYHLYVSLACPWAHRTLIFRALKGLQTHIDVTIVCPDMLSHGWQFGIPEPLYGYTQLHQLYTHAKADYTGRVTVPVLWDKKLHTIVSNESSEIIRMFNSAFNELTGNQTDYYPQALRTVIDEWNEFIYPNINNGVYRCGFATTQKAYEEAFEALFAALDKVDQHLTTHRYLAGNQITEADWRLFTTLVRFDAVYVGHFKCNRQRITDYPHLSGYLRELYQVPGIQETVDFYHIKRHYYFSHTTINPTQVVPVGPQVDLLSPHQRERIG

SEQ ID NO: 77225 - protein, 714 aa, Vibrio cholerae
MSRTIMLIPISAGVGLTSVSMGLLRAMERKGVSVSFYKPIAQPRTGDDQPDLTSTVMSRNSDIKIGQPMSMSAAETLIGSEKMDVLLETVVERYNQINKDAEVTLIEGLVPTRKHPFANQVNAEIANTLGAEIVFVATPGTDNPTQLKERIEVACSNFGGTKNKSISGVIINKLNAPVDEAGRTRPDLSEIFDDADHAKQANLEVMQIFNTSPIRVLGCVPWSIDLIATRAIDMAKHLKAEIINQGDINTRRIKSITFCARSIPNMIEHFKPGSLLVTSADRPDVIVAAALAAMNGVEIGAVLLTGGYDIPRELVSLCKPAFDTGLPIFKAQGNTWQTSLNLQSFSLEVPADDKERIEFISEHVASHIDGPWVDSLTEGAQASRRLSPPAFRYQLTELARSANKRIVLPEGDEPRTVKAAAICAERGIAQCVLLGNPEEIKRVAAQQGVELGSGIEIIDPKVAQEKYVARLVELRKSKGMTEVVAREQLEDTVVLGTMMLERNEVDGLVSGAVHTTANTIRPPLQIIKTAPNASLVSSIFFMLLPDQVLVYGDCAINPDPNAEQLAEIAIQSADSAAAFGIEPRVAMISYSTGTSGQGADVDKVREATRIAKEKRPDLVIDGPLQYDAAIMENVAASKAPNSPVAGKATVFVFPDLNTGNTTYKAVQRSADLVSIGPMLQGMRKPVNDLSRGALVDDIVYTIALTAIQAGQEQK

SEQ ID NO: 77226 - protein, 152 aa, Vibrio cholerae
MDMNNKVGIVHSLKDGQKYMDIWPMRKELNPLFPEQRVIKATRFAIKVMPAVAAISVLTQMVFANTQAMPQAIVVALFAMSLPLQGIWWLGHRANTQLPPALASWYRELYMKIVETGFALEPIKSKPRYKELAQVLNRAFRQLDDTALERWF

SEQ ID NO: 77227 - protein, 323 aa, Vibrio cholerae
MRVILGPMEGVLDHLMRDMLTQINDYDFCVTEFVRVVNLLLPDHVFYRLCPELQQGSKTPSGVPVKVQLLGQDPHWMAENAIRAAELGAYGIDLNFGCPAKMVNQSKGGAALLQHPELIYQVVKACRDAVPAHIPVSAKIRLGWEDPEDCFEIVDAVAQAKADELTVHARTKAGGYKASEIKWHYIDQIRQKCSIPLIANGEVWNYADGQACIQTTGVDSLMVCRGALNVPNLGNVVKHNHAAMPWHEVVDLLLRYTQFEVRGDKGKYYPNRIKQWFAYLRHAYPQANELFGELRTLTQVEPIVDQLHRYRDQLHHAAAELPV

SEQ ID NO: 77228 - protein, 449 aa, Vibrio cholerae
MSNYSLDFSGDEDFRPLAARMRPQTVEQYIGQQHILGPGKPLRRALEAGHIHSMILWGPPGTGKTTLAEVAANYANAEVERVSAVTSGVKEIRAAIEKARENKLSGRRTILFVDEVHRFNKSQQDAFLPHIEDGTVTFIGATTENPSFELNNALLSRARVYKLTSLNQQEILQALHQAIADTERGLGKVAAVFADNVLDRLAELVNGDARMSLNYLELLYDMAREDDQGRKQIDLPLLAEVAGEKVSRFDNKGDIWYDLISAVHKSIRGSDPDAALYWAARMISAGCDPLYIARRLLAIASEDVGNADPRGMQVALAAWDCFTRVGPAEGERAIAQAIVYLACAPKSNAVYTAWKQALSDAHNLPEFEVPPHLRNAPTRLMKDLGYGEEYRYAHDEPGAYAAGECYFPPEMSGTRYYQPTPRGLETKIAEKLAYLADLNAKSPQKRYEK

SEQ ID NO: 77229 - protein, 435 aa, Vibrio cholerae
MLDSKLLRTELDETAAKLARRGFKLDVETIRTLEEQRKSIQVEVENLQSTRNSISKQIGQLMASGDKAGAEAVKQQIGTLGDDLDAKKVELDAVMAQLDAITQTVPNIPDDAVPNGKDDSENVEVSRWGTPKTYDFEVKDHVDLGEMGDGLDFASATKITGARFVVMKGQFARLHRAIAQFMLDLHTDQHGYTELYVPYLVNAETLFGTGQLPKFGQDLFHTEPLTEKASDEEPRRLSLIPTAEVPVTNLVRDTILDEAELPLKMTAHTPCFRSEAGSYGRDTRGLIRMHQFDKVELVQITRPEDSMAALEELTGHAEKVLQLLELPYRKVILCTGDMGFGSCKTYDLEVWVPAQKTYREISSCSNMWDFQARRMQARFRRKGEKKPELVHTLNGSGLAVGRTMVAILENYQEADGRIAIPAVLQKYMGGLTHIG

SEQ ID NO: 77230 - protein, 428 aa, Vibrio cholerae
MMMDLAFDRCHIWHPYTSTLTPLTCYPVSRADGVMITLEDGRSLVDGMSSWWAAIHGYNHPKLNQAAHQQIEQMSHIMFGGLTHQPAIELCQKLLKLAPNNLQQVFLADSGSVAVEVSLKMALQYWHSKGQPRAKFLTLRHGYHGDTFAAMSVTDPDNSMHSLYKGFLPEHIFANSPEGGFFDAWDERDIADFRHKLTEHHHQIAAVILEPIVQGAGGMRIYHPEFLRQVRALCDEFGVLLILDEIATGFGRTGKLFACEHAGIQPDILCVGKALTGGYMTLSATLTTQQVADTVCAGEAGCFMHGPTFMGNPLACAVASASLSLIEQGDWQQQVANIEAFFAEQLPKLNDSPRVKQTRWLGAIGVVETHLPVNMEVIQALFVEHGVWIRPFGRLIYLMPPYISQPEHLQKLVDAMAAALNQPDCFKQ

SEQ ID NO: 77231 - protein, 350 aa, Vibrio cholerae
MEVRHNWTVAEVKALLDKPFMDLLFEAQQVHRLHHPHNHVQVSTLLSIKTGACPEDCKYCPQSAHYRTDVDKERLMEVERVLDAAQKAKNSGSTRFCMGAAWKNPKERDMPLLKEMIRGVKDMGLETCMTLGMLTPDQAQQLAQAGLDYYNHNLDTSPEFYGNIITTRTYQDRLDTLSHVRDAGMKICSGGIIGMGESTNDRAGLLVELANLPTHPESVPINMLVKVKGTPLEQVDDVEPFDFVRLIAVARIMMPKSAVRLSAGREKMNEQMQALCFMAGANSIFYGCKLLTTPNPAEDSDMLLFKKLGINREQVAQKPDEITENELLDRVVERVAARPTASDLFYDAAL

SEQ ID NO: 77232 - protein, 456 aa, Vibrio cholerae
MELSALTAVSPVDGRYGSKTIALRSIFSEFGLLKYRTIVEIRWLQKLAATAEIAEVPAFSAEANQFLDAIAANFNEADALRIKEIERTTNHDVKAVEYFLKEKVAAMPELHAVNEFIHFACTSEDINNTSHALMLKEARDTVILPEIRNVIDAIRKLAEEYRDIPLLSRTHGQPASPSTMGKEMANVAYRMERQYKQIANVEILAKINGAVGNYNAHLSAYPTVDWHKFSEEFITESLGVDWNPYTTQIEPHDYIAELFEAVARFNTILIDFDRDVWGYIALGHFKQRTIAGEIGSSTMPHKVNPIDFENSEGNLGLANAVFTHLAQKLPISRWQRDLTDSTVLRNLGVGVGYAIIAYTSTLKGISKLEVNRDALLAELDHNWEVLAEPIQTVMRRYGIEKPYEKLKELTRGKRVDGEAMRQFIDGLALPAEEKTRLKAMTPASYIGYAIELTDKL

SEQ ID NO: 77233 - protein, 372 aa, Vibrio cholerae
MMSVEHSANSQKKVIVGMSGGVDSSVSAYLLKQQGYQVEGLFMKNWEEDDNEEYCTAAEDLADAQAVCDKLGIPLHTINFAAEYWDNVFEYFLAEYKAGRTPNPDILCNKEIKFKAFLEFADEVLDADYIAMGHYVRRTFPQNGEKPQMLRGLDGNKDQSYFLYTLSHEQVARTLFPVGELEKPEVRRIAEEQGLITAKKKDSTGICFIGERKFTDFLSRYLPAQPGKIETPEGKVIGEHQGLMYHTLGQRKGLHIGGMKESSEQPWYVADKDLKRNVLIAVQGADHPLLKSHGLVAAQLHWVDRTPITEPVRCSVKTRYRQSDIACTIIPLSDDRIKVMFDEPQVAVTPGQSAVFYQGEICLGGGIIEERI

SEQ ID NO: 77234 - protein, 434 aa, Vibrio cholerae
MKFPGQRKSKHYFPVHARDPLVIQAQENKKMSRTHIIGIDQTLVDIEAKVDSDLIERYGLSKGHSLVIDDHAAEALYNELKEQRLITNEYAGGTIGNTLHNYSVLADDRSTLLGVMSQDIKIGSYGYRYLCNTSSRMDLNYLQGVDGAIGRCFALITEDGERTFAISEGQMNQLRPDSIPEKIFASASALVITAYLVRCKEGDPMPEATMRAIEYAKKYDVPVVLTLGTKFVIQDDPKFWQEFLRDHVTVVAMNEDEALALTGESDPLAASDKALDWVDLVLCTAGPVGLFMAGYTEDSAKRETSLPLLPGSVPEFNRYEFSRPARKESCINPIRVYSHISPYMGGPEKIKNTNGAGDAALSALLHDMAANKYHKENVPNSSKHQHEFLTYSSFSQVCKYSNRASYEVLAQHSPRLSRGLPEREDSLEEAYWER

SEQ ID NO: 77235 - protein, 533 aa, Vibrio cholerae
MNLIDFASSPLSVLPPLVALSLAIVTRRVLLSLGVGIFLGALLLADYSIGQSLQYIATQVGSVFVKEGAINAWNMSIVGFLLLLGMMTALLTLSGGTRAFAQWAQVRVKSKRGSKLLAAFLGVFIFVDDYFNSLAVGSISRPVTDRFYVSRAKLAYILDSTAAPMCVVMPASSWGAYIMTIIGGILVSHGIEEYSALGAYLRLVPMNFYAIFALLMVFAVVWFQMDIGQMRKHEIAASQGRGFDEDPSTDTQEAHELNEELDIRESERGTVLDLVLPIVFLVVATIGAMIWTGASALAESGQSFDIFGAFENTNVGTSLVYGGLVGLAMAFVTVLRQKLPTAEIAKTLWIGAKSMFGAILILIFAWTIGSVIGDMKTGAYLSSLVQGNIDPHWLPVILFVLSGAMAFSTGTSWGTFGIMLPIAGDMAGATDIALMLPMLGAVLAGSVFGDHCSPISDTTILSSTGARCHHIDHVATQLPYALAVALVSAIGYVVLGIFASLGLALAAASVSFVVVCLIFAALSKAKVSKQVSA

SEQ ID NO: 77236 - protein, 304 aa, Vibrio cholerae
MQRKNDMQTQRLRIAIQKKGRLSQECQELLKKCGVKFNIMGERLVVHSLNMPIDLLLVRDDDIPGLIMDGVVDLGFVGENVLEETRLDRLALNQRNEFTTLRRMDFGGCRLSIAIEKDAEYRGPQDLNGKRIATTYPQLLKAYMDRQGVDFSTCMLTGSVEVAPRAGLADAIADLVSTGATLEANGLKEVEVIFESKATLIQRPGAFAADKAALIDKLLTRMHGVQQAKESKYIMLHAPVEKLAQIKTLLPGAEDPTVLPLSADKSKVAVHMVSSENLFWETMEQLKALGASSILVLPIEKMME

SEQ ID NO: 77237 - protein, 301 aa, Vibrio cholerae
MLSGMIFVFAPLVVGYLFIIRNPSHLHRLSRATSHLVYVILFLMGLSLAGLDNLQSNLQTIVKYTAVFFVVLGTCNLLVLPLVDRYLPLSTDITHKKVPLSSMMLESAKLILVVGAGLVAGVLLNQDLHWVESASGWILFLLLFFIGIQLRNSGLSLKQILLNKHGMVIAAVIILTSWLGGVIAAWLLDMPIYQALAMASGFGWYSLAGILVGDAFGPVLGGASFMIELLRELVALVLIPMLIRRKPCTAIGYAGATAMDFTLPVIQTTGGVKCVPVAIVSGFILSLLVPVLILFFVSLAS

SEQ ID NO: 77238 - protein, 591 aa, Vibrio cholerae
MRSHYCGHLNKSLVGQTVELCGWVNRRRDLGGLIFIDMRDREGIVQVVVDPDMADVFAVANQLRSEFCIKLTGEVRARPESQVNKEMATGEVELLARSLEIINRSDVLPLDFNQKNSEEQRLKYRYLDLRRPEMSDRIKLRAKASSFVRRFLDTHGFLDIETPVLTKATPEGARDYLVPSRVHKGSFYALPQSPQLFKQLLMMSGFDRYYQIVKCFRDEDLRADRQPEFTQIDIETSFMTAEQVRAVTEKMIREMWLELLNVDLGDFPIMPYSEAMRRFGSDKPDLRNPMELVDVADLLKDVDFKVFSGPANDPKGRVAALCIPGGAALTRKQIDEYTAFVAIYGAKGLAWLKVNDLAAGMEGIQSPVAKFLTEEIIQAIIERTQAQTGDIILFGADSAKVVAEALGALRLKAGKELGITNESAWAPLWVVDFPMFESDDEGNVAAMHHPFTSPLNLSPEQLKANPEEALSNAYDMVLNGYEVGGGSVRIHNAEMQSAVFDILGITPEEQRLKFGFLLDALKFGTPPHAGLAFGLDRLVMLLCGTENIRDVIAFPKTTAAACLMTDAPSLANPAALEELAIAVKLATKDKA

SEQ ID NO: 77239 - protein, 192 aa, Vibrio cholerae
MAQMYFYYSAMNAGKSTTLLQSAFNYQERGMNPLIFTAAIDDRFGVGKVSSRIGLEAEAHLFHADTDLLHVIATLHEAEPRHCILMDECQFLSKEQVYQLTEVVDKLDIPVLCYGLRTDFLGELFEGSKYLLSWADKLIELKTICHCGRKANMVIRTDEHGNAISEGDQVAIGGNDKYVSVCRQHYKEALGR

SEQ ID NO: 77240 - protein, 396 aa, Vibrio cholerae
MAKLNAYFGEFGGQFVPQILVPALDQLEQAFIDAQQDDAFRAEFMSLLQEYAGRPTALTLTQNITKGTKTKLYLKREDLLHGGAHKTNQVLGQALLAKRMGKHEIIAETGAGQHGVATALACALLGLKCRVYMGAKDVERQSPNVFRMRLMGATVIPVHSGSATLKDACNEALRDWSASYETAHYLLGTAAGPHPFPTIVREFQRIIGEETKNQILAREGRLPDAVIACVGGGSNAIGMFADFIEEESVRLIGIEPAGKGIHTHQHGAPLKHGKTGIFFGMKAPLMQDEHGQVEESYSVSAGLDFPSVGPQHAYLNAIGRAEYESITDDEALDAFQALARNEGIIPALESSHALAHAIKMAYAEPDKEQLLVVNLSGRGDKDIFTVHKLLEDKGAL

SEQ ID NO: 77241 - protein, 469 aa, Vibrio cholerae
MSEQLSEHISVQTAQMAQVLVKIVNDKYQWIEERKAKQPLASFHPLLTRSERDFYQALSGDNTVFILECKKASPSKGLIREEFDLDYIASVYGEYASAISVLTDEKYFQGRFEFLPQVRAQVAQPVLCKDFMVDPYQVYLARHYQADAILLMLSVLNDDQYRELAAVAHDLGMGVLTEVSNEQELKRAVDLQAKVIGINNRNLRDLTTDLNRTKQLAPLIPQGTIIISESGIYTHQQVRDLAEFANGFLIGSSLMAQSNLELAVRKIVLGEHKVCGLTHPDDAVKAYQAGSVFGGLIFVEKSKRFVDVEQARLTMSGAPLQYVGVFQNHPAAQVADIATKLGLFAVQLHGEEDSAYVSELRASLPESIEIWKAYGVSDALPELLPEHIDRHLLDAKVGEQSGGTGRSFDWRLLPKHSDLMLAGGLSAENVAQAAQLGCRGLDFNSGVESAPGKKDANQLQQVFQQLRNY

SEQ ID NO: 77242 - protein, 353 aa, Vibrio cholerae
MGIVFNASADSIRVTAQGENVMQTIINKLYEQQGLTQAESQQLFDQIIRGEMDPVLMAAVLTALKIKGETPDEIAGAAKALLANANPFPRPDYDFADIVGTGGDGSNTINISTTAAFVAAACGVKVAKHGNRGVSSKSGSSDLLSSFGINLAMSAQDSRQALDDLGVAFLFAPQYHGGVRHAMPVRQTMKTRTIFNILGPLINPARPNIELMGVYSKDLVRPIAQTMLQMGLKRAAVVHGSGLDEVAIHGETQVAEIRQGELIEYTLTPEDFGVSRYPLDAIRGGEPEENRAIITQILTGNGTAAQMAAVAVNVALLLRLFGQEDLKANTQQAIAVMKSGQAYGLVQQLAQRG

SEQ ID NO: 77243 - protein, 290 aa, Vibrio cholerae
MRIDLHSHTTASDGRFTYQQLIDRAVSFEIDVLAITDHDTVAALADARAYIAQQQYPLQLVNGIEISTVWQNKDIHIVGLNIDPNSEALGQLIARQQQRRVERAELIAHRLQKATREGVLEEVQHIADGAPITRAHFAKWLVDNGYATNMQQVFKKYLTRDNPGYVPPNWCSMSEAVSAIHAAGGQAVLAHPGRYDLTAKWLKRLMTAFVEAGGDAMEVAQPQQSPQEKRTLGDYAMEYQLLASQGSDFHYPSPWMELGRNLWLPAGVEPVWKDWGLSPSNRVERLDEEE

SEQ ID NO: 77244 - protein, 321 aa, Vibrio cholerae
MSEKLQKVLARAGHGSRRELEALIRAGRVSVNGKVAVLGERLEDDNAVVRIDGHVVSVKAQEEVICRVLAYYKPEGELCTRHDPEGRRTVFDRLPKIRGSRWISVGRLDANTSGLLLFTTDGELANRLMHPSRQVEREYLVRVFGDVTEEKVRNLVRGVQLEDGMARFEDVMYAGGEGINHTFYVVINEGRNREVRRLWESQGTTVSRLKRVRYGDIFLDKKLPRGGWMELDLKQVNYLRELVELRPEKETVLNMAPDAATRKRERTRSQKIRRAVRRHEERISATPGRSGKAPARRKPGGESSTRNKVANQQQSSRKPRG

SEQ ID NO: 77245 - protein, 511 aa, Vibrio cholerae
MLHLMIKPGQLSLKQLRQVSRSPVVLSLDPEAIPAIAESAQVVEQVISEGRTVYGINTGFGLLANTKIAPQDLETLQKSIVLSHAAGIGELMSDETVRLMMLLKINSLARGYSGIRLEVIQALIELVNNQIYPCVPKKGSVGASGDLAPLAHMSTVLLGEGQARYNGKIISGLEAMKIAGLEPITLAPKEGLALLNGTQASTAFALEGLFVAEDLFASATVCGAMSVEAALGSRRPFDPRIHRVRGHRTQMDAATAYRHLLDVSSEIGQSHSNCEKVQDPYSLRCQPQVMGACLQQIRSAAEVLEVEANSVSDNPLVFAEDGDIISGGNFHAEPVAMAADNLALAIAEIGSLSERRMALLIDSALSKLPPFLVDNGGVNSGFMIAQVTAAALASENKTLAHPASVDSLPTSANQEDHVSMATFAARRLRDMGENTRGILAVEYLAAAQGLDFRAPLKSSPRIEEARQILREKVPFYDKDRYFAPDIEKANALLQLAVHNRLMPDQLLPSQH

SEQ ID NO: 77246 - protein, 565 aa, Vibrio cholerae
MTQSSAQGTRLDTQRTIRAPRGTQLRAKSWLTEAPLRMLMNNLDPDVAEHPHALVVYGGIGRAARNWECFDKIVEVLERLEDDQTLLVQSGKPVGVFPTHKNAPRVLIANSNLVPHWANWEHFNELDKQGLMMYGQMTAGSWIYIGSQGIVQGTYETFVAVAKKHFNGDAKGRWVLTGGLGGMGGAQPLAATMAGFSMIAVECDESRIDYRLRTGYVDKKANTLDEALAMIADTDRPISVGLLGNAADIFPELVKRNITPDVVTDQTSAHDPLNGYLPLGWSMEKAAQMRQQNEAEVVKAAKASMAIQVRAMLDLQTRGAATLDYGNNIRQMALEEGVANAFDFPGFVPAYIRPLFCEGIGPFRWAALSGDPEDIYKTDQKVKELIPDNPHLHNWLDMARERIHFQGLPARICWVGLKDRARLGLAFNEMVKNGELKAPIVIGRDHLDSGSVASPNRETEGMLDGSDAVSDWPLLNALLNTAGGATWVSLHHGGGVGMGFSQHSGMVICCDGSDDAAERIARVLHNDPATGVMRHADAGYEIAKRCAQQQKLDLPMLNAELAKLK

SEQ ID NO: 77247 - protein, 236 aa, Vibrio cholerae
MSPRYLQIKQFMLDNIESGRWPVGYRTPTELELTEQFGVSRMTVNKALRDLVSEGKLQRRPRLGTFVCAAEEKAESPLLDIRNIADEILSRGKQYHNKVVEQRALSADEAVAIKLGVMVGSPVFYSEIIHYANDIPMQLEVRWVNSRSVPHYLDQDFTQITPNQYLSQNCPLSAIEHTVEAIVADAHVKQALALAANEPCLLLNRRTWSGDKLVSSALLYHPGSRYKLSSKILFSQ

SEQ ID NO: 77248 - protein, 185 aa, Vibrio cholerae
MRFNIPNLLSLLRLFLIPVFVVTFYLPFEWAPFVAAMVFWVAGFTDWLDGMLARKLGQTSRFGAFIDPVADKVLVATALILITEHYHSIWITIPAVTMIAREIIISALREWMAEIGKRASVAVSWVGKVKTLTQMFALWVLIWRYDDWMIWLGYISIYVATVLTYWSMVQYLAAAKDDLLNEEHH

SEQ ID NO: 77249 - protein, 327 aa, Vibrio cholerae
MQHLQEIIANATSAINAAESLVALDEVRVQYLGKKGELTVQLQSLGKLPPEERRTAGQEINVAKEAVQKALAERKDALQSAELEAKLAAETIDVTLPGRRIENGGLHPVTRTIERIESFFGELGFTVESGPEIEDDFHNFDALNIAADHPARTDHDTFFFNPKLMLRTHTSGVQIRTLEERQPPLRFIAPGRVYRNDYDQTHTPMFHQVEGMLVDENVNFAQLKGILHDFLCNFFEEDLEVRFRPSYFPFTEPSAEVDVKGKNGKWLEVLGCGMVHPNVLRSVGIDPEKYSGFAFGMGVERLTMLRYGVNDLRAFFENDLRFLKQFK

SEQ ID NO: 77250 - protein, 795 aa, Vibrio cholerae
MKFSESWLREWVNPAITTDELTHQITMAGLEVDDVLAVAGVFDGVKVGHVVECAQHPDADKLRVTKVDVGEEELLDIVCGAANCRQGLKVAVATVGATLPGDFKIKKAKLRGQPSHGMLCSFSELGIDVESNGIMELAENAPIGMDFRDFLSLNDVTIDVDLTSNRADCFSIRGLAREVGVLNRADVTAPAVNAIVATINDTISIDVKAPAACPRYLGRIVKNVNVQAQTPLWMQEKLRRCGIRSIDPVVDITNFVMLEQGQPMHAFDLAKIEGGIVVRLAEQDEKLTLLDGSEAKLNADTLVIADQQKALAIAGVFGGEHSGVSTDTKDVLLECAFFAPDHIRGRARSYGLHTDSSMRFERGVDYALQHAAMERATQLLVEICGGDVAPVVAAESAADLPKPNQVALRRSKLDKLLGHAIPDADVVEILERLGMQVETTAEGWQATAPTWRFDIAIEQDLVEEVGRIYGYNNIPNQAPVAALNMNLHNEAKLPLKRVRDLLVDRGYQEAITYSFVEPEQQKLVVPGVDALILPNPISAEMSAMRLSLIQGLLNTVVHNQKRQQPRVRLFEYGLRFIPDAAAENGMRQEPMLAGVISGARGEEHWNMETATVDFFDMKGDLEAVLELTAKGKAYSFAATKHPALHPGQAAAIMVDGKAIGVIGTVHPELERKFGLNGRTIVFEIEWNAINTRVIPEAAAISKFPANRRDIALVVDGNIASGDIVEACRVAGGELLKDAKLFDVYVGKGVEEGKKSLAIALTLQSVERTLEEADIAAAVEAIVQAVSAQFGAALRD

SEQ ID NO: 77251 - protein, 474 aa, Vibrio cholerae
MQQEHQPTFFFFDYETWGVNPAKDRPSQFAGVRTDMDFNIIGEPLVIYCQLPNDYLPAPEAALITGITPQKANSQGLAEPEFIARIHAELSTPNTINLGYNSIRFDDEVTRYTCYRNFIDPYAWSWQHGNSRWDLLDVLRACHALRPEGIEWPENDDGFTSFKLEHLSVANGIEHSNAHDAMADVIATIELAKKVKAAQPKLFDYFFTMRHKRKLTELIDIVNQTPLMHVSGMLGRERHYTSWIVPIAWHPTNQNAVIVVDLGKDPQPLLELDAETLQARLYTRYEDLAPDELPVPVKLVHLNKCPILAPAKTLTAENAQKIGIDREQCLAHLNVIRQHPEIREKLVTVFSQEREFNQESDVDSQLYAGFFSPADRAAMEIIRTTAPENLGSLAIRVADKRIEPLLFRYRARHYPHTLTDTEQRRWAAHCRDYFERNLEGYMLNLENLVHEHQADPKKMAILKSVYHYVEKLAC

SEQ ID NO: 77252 - protein, 342 aa, Vibrio cholerae
MTKSLFRQSFLFDSLDLDHPMVAQTVRTEQGVTLKLHQRGVLEVIPAQTDAATKNMVISCGIHGDETAPMELLDKWIDDIVSGFQPVAERCLFIMAHPQATVRHVRFIEQNLNRLFDDKPHTPSTELAIADNLKVLLRQFFANTDEHSRWHLDLHCAIRGSKHYSFAVSPKARHPVRSRSLMQFIEQAHIEAVMLSNAPSSTFSWYSAEHYAAQALTLELGQVARLGENLLDRLLAFDLAMRDLISRHKPEHLPRKSVMYRVSRTIVRLHDDFDFRFSDDVENFTAFMHGEVFGHDGDKPLMAKNEGEAIVFPNRKVAIGQRAALMVCKVNTRYEDDQLVYD

SEQ ID NO: 77253 - protein, 335 aa, Vibrio cholerae
MNDKMDFHRLLQHKQQRWQRSSYLLIGLFLSVCVLYLLVGELWLSPFSAWSSLEQQLVWELRLPRLLAAAVIGASLAVAGATLQVLLGNVLAEPGVVGVSGGASVAMVILLLFFPSLNSPVAFMAAAVLGALLFTLLLVVMARKLRLTTARLLLVGVALGILSGAVVTWAFYFSDDLGLRQLMYWLMGSVAGVSWYQHLLSLVAVPVVIWLVLQGGVLDKLMLGEGHAKQLGIDIHRVRWRLILAIALLVGASVALGGVIGFVGLVVPHLLRLTLGSENRLLLPLSALCGALLLVSADLIARLALGSGELPLGVVTTTLGAPIFIWMLVRNHDSC

SEQ ID NO: 77254 - protein, 389 aa, Vibrio cholerae
MLRQEAKRMKATMAYSTFTQKKNDQLKEPMFLGQPVNVARYDQQKYEIFEKLIEKQLSFFWRPEEVDVSSDRIDYGKLPDHEKHIFISNLKYQTLLDSIQGRSPNVALLPLVSLPELETWIETWSFSETIHSRSYTHIIRNIVNDPAVVFDDIVENEHIIKRAKDIAHYYDDLIELTNDYHRYGEGQHQINGETITVSLKELKKKLYLCLMSVNALEAIRFYVSFACSFAFAERELMEGNAKIIKLIARDEALHLTGTQHMLNLLRNGMDDFTFLQVAEECKQESFDLFKEAAEQEKEWAEYLFKDGSMIGLNKDILCQYVEYITNIRMQAVGLEPAYPAATNNPIPWINAWLSSDNVQVAPQEAEISSYLVGQIDNEVSADDFEGFEL

SEQ ID NO: 77255 - protein, 761 aa, Vibrio cholerae
MNQQLTVTKRDGRKENIDLDKIHRVITWAAEGLQNVSVSQVELRAHIQFYDGITTSDIHETIIKSAADLISEETPDYQYLAARLAVFHLRKKAYGQYEPPTLLAHVTKMVEKGKYDKHLLEDYTREELELMDQFIDHRRDLDFSYAAVKQLEGKYFVQNRVTGQIYESAQFLYILVAACLFAKYPKETRLDYIKRFYDATSTFKISLPTPIMSGVRTPTRQFSSCVLIECGDSLDSINATASSIVRYVSQRAGIGINAGRIRALGSEIRGGEAFHTGCIPFYKYFQTAVKCCSQGGVRGGAATVFYPLWHGEAESLLVLKNNRGVEENRVRHMDYGVQLNKLMYKRLVEGGNITLFSPSDVPGLYDAFFQDQDEFERLYVKYENDPSIKKKTVKALEIFTLLMQERASTGRIYIQNVDHCNTHSPFDAAVAPVRQSNLCLEIALPTSPLANVEDESGEIALCTLSAFNLGAIESLDDFEELSDLVVRALDALLDYQDYPLPAARRSSMNRRTLGVGVINYAYYLAKNGVKYSDGSANGLTHRTFEAMQYHLLRASMKLAKEQGRCPLFHETNYAKGLMPIDTYKKDIDLVCAEPLHYDWDKLRHEIMEHGLRNSTLTALMPSETSSQISNATNGIEPPRGYVSVKASKDGILKQVVPEFTRLKENYELLWNIGSNDGYLHLVGIMQKFVDQAISANTNYDPSNFDSGKVPMKKLLQDLLTAYKFGVKTLYYHNTRDGAKDEQTDATVKVQEDDCASGACKI

SEQ ID NO: 77256 - protein, 894 aa, Vibrio cholerae
MSDLAKEITPVNIEDELRSSYLDYAMSVIVGRALPDVRDGLKPVHRRVLFAMNVLGNDWNKAYKKSARVVGDVIGKYHPHGDSAVYDTIVRMAQPFSLRYMLVDGQGNFGSIDGDSAAAMRYTEVRMSKIAHELLADLDKETVDYVPNYDGTEQIPAVLPTKIPNLLINGASGIAVGMATNIPPHNLGEVIDGCLAYIDNEAITIDELMDYIPGPDFPTAALISGRKGIIDAYKTGRGKVYMRSKAEIETDKNGKETIIVSEIPYQVNKARLIEKIAELVKEKKVEGISALRDESDKDGMRIVIECKRDAVGEVVLNNLYANTQLQTTFGINMVALDNGQPKLFNLKEMLKCFVDHRREVVTRRTIFELRKARERAHILEGLALALANIDEIIELIRRAATPAEAKEGLIARGWDLGNVAAMLERAGTDAARPEWLEPQYGIRDGKYFLTEQQAQAILDLRLHKLTGLEHEKILDEYKQLLEEIAALMHILASTERLMEVIREELEAIRAGFSDARRTEITAATHDIDMEELIAREDVVVTLSHEGYVKYQLLSDYEAQRRGGKGKSATKMKEEDYIERLLVANTHDNILLFSTRGKTYRMKVYQLPLASRTARGKPIVNLLPLEENERITAILPVTEFSEDKFIFMATGDGTVKKTSLDQFANVRANGLIALNLRDEDSLIGVDITDGESEIMLFSKFGKVVRFKESEETAVVDENGQPVLDENGQPEIKFKGVRPMGRTAAGVRGMKLADGDQVVSLIVPKTEGDVLTVTENGYGKRTSLSEYPTKGRGTQGVVSIKVSERNGSVVGAVQVAEGDEFMMITNAGTLVRTRVAEVSQVGRNTQGVTLIRTSEGESVVGLQRIDEIEESELPEGEEALVENDAPVAQDDDGEQE

SEQ ID NO: 77257 - protein, 332 aa, Vibrio cholerae
MKGHTMSQYVVCALYKFVELNHYQELRAPLLALMEENHIRGTLLLAQEGINGTVASSRQGIDALLAWLENEPSLKGTVYKESSASEPPFNRTKVKLKKEIVTMGVEGIDPRHVVGTYVKPQDWNALISDPEVLVVDTRNDYEVQLGTFKNALNPKTETFREFPHYVQENLDPQKHKKVAMFCTGGIRCEKSTAYLKEQGFEEVYHLEGGILKYLEEVPQEQSLWEGDCYVFDGRVAVGHGLAESDYQICNACRLPITEEDKQSEQYEQGVSCPRCFGTHSEEQLERFREREKQVQLAKLRGESHIGEESAALIEKRRAEKLARKAAQRGQKG

SEQ ID NO: 77258 - protein, 446 aa, Vibrio cholerae
MNPMKLYDAIIGIVEKHIAPIAAKVGNQPHVRAMRDGFIVAMPFIIVGSFILIFAFPPFAEDTTNVFGRVWLNFATTHFDIIMMPFNMSMGIMTIFVSLGVAYSLAKAYKMDGITSAVLSLMSFLLVAAPAKEDSLSMAHMGGTGIFTAVMCAFFAVELYRFMKKHNITIRMPEQVPPAIARSFEVLLPVLAIFLTLYPLSLFVQAEYGMLIPDAVMAMFKPLISASNTLPAIIGALLVCQLLWFAGIHGAAIVVGLLSPIFLTNISANIDAFVTGQPVPNIFTQPFWDFYIFIGGSGATLALVILMSFSRSAHLKSIGRMSAVPGFFQINEPVIFGSPVVMNPILFLPFVFAPVINATIAYFAIQLGFVGMGVATTPWTTPAIIGASWGSGWTFTPVLLVVGLLILDLLIYLPFFKMFEKQVLEQEQPVESKVKAAQPGRQGVTA

SEQ ID NO: 77259 - protein, 111 aa, Vibrio cholerae
MEQELIVMEIICNAGEARSLCYEALRLARTRSFEQAEEKLCQAKECLNRAHLIQTQLIEADQGEGKVPMTLVMVHAQDHLMTTILAQEMATEMVALHKHLAGEEAKCLEMH

SEQ ID NO: 77260 - protein, 721 aa, Vibrio cholerae
MTNPMVEQGASQLMGGSAMPPEQHGEMPEQNLKRLSEGFPRDAIQTGGVKSCSWRRVFVVGFALLISAFAIFEMRGVFLVGGLTPIEYAVLVLFAINFCWIALAFSSSIAGFFVLASRKPAPNTEQPLTTRTAILMPTYNEAPDRVFAAVETMALALAKTEHGHAFDWFILSDTTDPEVALSEEQAFWLLRQQTAGKANVYYRRRRKNIARKAGNIADFCRRWGSGYDHLLVLDADSVMQPSTMISLAQRMQSDPDAGLIQTIPALINGTTLMARVQQFAARIYGPVVGTGLAWWVQKEGNFWGHNAIIRTEAFMSAAGLPHLSGRPPFGGHILSHDFVEAALIRRAGWSVTIAADLSGSFEECPPSIIDLAVRDRRWCQGNLQHSRIIGTKGLHWISRLHLTTGIMSYLSSPFWLLLILSGLLLALQAHFIRPEYFTEQFSLFPTWPVMDSARALQLFYITMGILFSPKIFGLLLLMFDGEMCRTLGGRLRVILSAVTEILLSALVAPIMMLIHCGAVVSILFGRDSGWAPQRRDDGSLPIKDLLYRHRWHMTAGVLLGYAAMLDSWTLLAWMSPALIGLWFSVPLSGITASYTIGAWFKQKRILATPEEIETPAIVLAAQARRDEYVVDLQEVWNARMVLADHNLIALHIAMMDKLPSRQPGTAIEPLDAVARIKVQEAESQESLLALLTKVELSYVLGNPLLIQQVAKLPPSLANQTV

SEQ ID NO: 77261 - protein, 481 aa, Vibrio cholerae
MALGCLYISTETVINMTYAPVNDVLSGKLAVDSEVTVRGWIRTRRDSKAGISFLAIYDGSCFNPIQAVVPNNLNNYDNEVLKLTTGCSVEVTGKIVESPASGQAFELAASDVKVVGWVEDADTYPMAKTRHSIEYLREVAHLRPRTNVIGAVARVRNCLAQAIHRFYHEQGYFWVSAPLITASDAEGAGEMFRVSTLDMENLPRTDAGKVDYNQDFFGKETFLTVSGQLNAEAYACAISKVYTFGPTFRAENSNTSRHLAEFWMVEPEVAFADLNTVAKLAEDMLKYVFKAVLAERRDDLEFFNDRINNEVIARLEQFVESDFAQVDYTDAIEILKNCGKTFEFPVEWGIDLASEHERFLAEEHFKAPVIVKNYPKDIKAFYMRMNEDGKTVAAMDVLAPGIGEIIGGSQREERLDILDARMREFGIDPEHMDWYRDLRRYGTVPHAGFGLGFERLVSYVTGMGNVRDVIPFPRTPRSASF

SEQ ID NO: 77262 - protein, 122 aa, Vibrio cholerae
MMMKTELYKEFMFEAAHHLPHVPAGHKCGRLHGHSFLVRLYVEGEVDPHTGWVVDFAEIKAAFKPIYDRLDHYYLNDIEGLENPTSEVLAKWIWQQLKPSLPLLSKVEIKETCTAGCIYRGE

SEQ ID NO: 77263 - protein, 453 aa, Vibrio cholerae
MISVFDIYKIGVGPSSSHTVGPMKAGKEFIDELRSMGKLRDVTKITVDVYGSLSLTGKGHHTDIAIIMGLAGNTPEKVDIDSIPSFIARVEETERLPVGMHCHTVSFPREGGMNFHRTNLPLHENGMQIHAWINDEKIFSKTYYSIGGGFIVDEEHFGKENESLIQVPYAFRSAEELLNQCKESGLSISTLVMANEKAMHSDEEVRTYFANIWRTMRECMERGMNTEGILPGPLRVPRRAAALRQQLLTSEKTTNDPMAVVDWVNMYAFAVNEENAAGGRVVTAPTNGACGIIPAVLAYYDKFIQTVTEKDYIRYFAASGAIGGLYKRNASISGAEVGCQGEVGVACSMAAAGLAELLGGSPEQVCMAAEIAMEHNLGLTCDPVAGQVQVPCIERNGIAAVKAINSTRMALRRSSAPRVSLDKVIETMLETGKDMNAKYRETSQGGLAIKVIC

SEQ ID NO: 77264 - protein, 204 aa, Vibrio cholerae
MQNISRHEFIQQFQLHLPAAYPQESLRRVAHLAPEKLRKASVLIGVVERPQGLQVIMTKRAAHLRHHPGQISFPGGKYEESDHSLQQTAKREAREEIGIPEEKIRIVGQLPELVTVSQFAVTPFLAFVESDYPIQLDHNEVDEVFEVPISFLLDRKKIYSGTFQLKKHRHKLFALSYKQHFIWGMTAQIIQSLQKQFINYNELV

SEQ ID NO: 77265 - protein, 458 aa, Vibrio cholerae
MNNNQTLSIEHKKLTYHPDIAKQFFTSIEQQPWAMLLRSASTTHMDSRFDILVANPFATLVTFGDETEIHAQNGVTLSREDPFALLADIQEQYLPQVTDESELPFVGGALGYFSYDLGRRVEVLPSLAEQDIAMPDMAVGIYSWALVVDHQQHTAQLVGQNVEDAWGWLNQQEAIKPSEVTDFALTSPWRSNMSYTAYQDKFARVQDYLRSGDCYQINLAQRFQAHYTGSEWQAYLKLEKGNQAPFSAFLRLPQGAILSVSPERFLQVCDRVIETKPIKGTRPRHADKQQDALLKQDLVSAEKDQAENLMIVDLLRNDIGRVAKPGSVHVPKLFDVESFPAVHHLVSTIRATLDEQYQAADLLRACFPGGSITGAPKVRAMEIIEELEPHRRSAYCGSIGYLSRHGKMDTSITIRTLVAYQQQLYAWAGGGLVADSEGAAEYQETLDKLSRILPTLES

SEQ ID NO: 77266 - protein, 505 aa, Vibrio cholerae
MTVIRKQDVISSVADALQYISYYHPLDFVKALEKAYQREESQAAKDSIAQILINSRMSAEGHRPICQDTGIVTCFVNIGMGVQWDSTDMTVQQMVDEGVRQAYTNPDNPLRASVLMDPAGKRINTKDNTPAVVHINMVPGDKVDIQIAAKGGGSENKTKMVMLNPSDDIAEWVEKTVPLMGAGWCPPGMLGIGIGGTAEKAAVLAKEALMEHIDIHELIERGPQNAEEELRLDIFNRVNKLGIGAQGLGGLTTVVDVKIKSAPTHAASKPVCMIPNCAATRHVHFTLDGSGPAQLTPPKLEDWPQITWEAGANTRRVNLDNITREEIQTWKTGETVLLSGKILTGRDAAHKRIQTMLQKGEKLPDSVDLKDKFIYYVGPVDAVGDEVVGPAGPTTSTRMDKFTDMMLEEVGVMGMIGKAERGPATVESIKKHKAVYLMAVGGAAYLVAKAIKKARVVAFEDLGMEAIYEFEVEDMPVTVAVDSTGANAHQIGPDTWRVKIAEAAK

SEQ ID NO: 77267 - protein, 292 aa, Vibrio cholerae
MPTIKSPLLIAILSLLAAMITIQSGASIAKQLFPLVGPGGTVALRISLSALILMLIFRPWRARLSWPQWRSMCIYGASLGGMQLSFYFAIERIPLGIGVALEFSGPLLLALLSSKRKKDLIWVALAILGIVFLLPDMNGVDALDPIGVALALIAGGFWAGYIWFGQRAGSVGSGGMTVSIGMLVAAVIYFPIATQLAEASIFSWSILPMALLVAVMSSALPYSLEMVALSRLSTQHFSVLMSLEPAIAAMAGLAILGETLQWSQWLAIFMIITASMGSTLSAAKSPTKVTQE

SEQ ID NO: 77268 - protein, 1023 aa, Vibrio cholerae
MASDSIPRRVLKKRRRAQKNKPRYWLIAVLLIGTAGGAALFHEMETSTLQSREISRYAAGLTYQVEPGASDKIAFPSYGPFDQRLGYVALPNIQERLLQRGFTIRQQVRFSDELQRYAQYGLYVPYTEKVQAGLTLFDCRTEPVYQFRYPGNHYADFNAIPDLIVQSLLFIENRDLLSDKNPLVNPAVDWPRFFKAALTQVGKALDLDGQSAGGSTLATQVEKYRHSEDGLTYSPQEKIRQMVSASVRAYRLGANTLEARKLVVWAYLNSVPLSAAPGYGEVHGLGDGLWVWFAADPERVNQLLDTRLNQSVNLAEQGLALRQVVALMIAHRRPSYYLAVSGRPDLNALTDSHIRLFYREKMISKSLMDAALNATLQFRDFVRQPAVTRINTNKGLLAARTHLSRQLGVSLYDLDRMDLSASTTLNFELQSEVTRYLQKLANPEYAAQVGILGFRLLAAEKTADVRYSFTLFERTDEGFKVRVQTDNTNQPFDLNEGSKLELGSTAKLRVLTTYLEIIAKLHSKYHDLSVMELRRHLVEAQDTLSVWSLEWLLTSPKRDLATMLEAALEREYSADPKERFFTGGGIHTFNNFRKEDDERIVTMRDALRESINLPFVRLMKDIERYTLYSEGYRAQLMKDDKDPRRMEYLRQFADKEGRAYLLRFWRKYKDKTTDERMATLLEGLKPSADRLAAVHRYLLPEASVSEFVRFMDDKLPPITRDKLTDKQLEKLYNKYGRGKYSLPDQGYIARVHPLELWLLGYLNEHHQASFSDVVAASSDKRQEVYSWLFKTRHRNARDSRVRTMLEVEAFTDIHQSWQRLGYPFDHLVPSLATALGSSGDRPAALSELMGIILNDGVRVPTKRINHLHFAQDTPFETEFTPVETQGVRVLPVEVARALRGALSQVVDSGTARRISGVFKLPDGTPIVLGGKTGTGDNRLQTVNRAGTVVQSLARNRTATFVFYLGDRHFGTLTAYVAGSDSEKFTFTSALPVQVLKGMAPILSPYLAPNEQECRPTMNPSSTQ

SEQ ID NO: 77269 - protein, 514 aa, Vibrio cholerae
MLSEFLHNKSDAMVNQTHEFLLEMTGVSKEFPGVKALDKVNLKVRPHSVHALMGENGAGKSTLLKCLFGIYEKDEGDIIFLGQHVNFSSSKEALESGVSMVHQELNQVKQCSVMDNIWLGRYPTKGFFVDHDKMYRDTKAIFAELDIDIDPKVKVATLSVSQMQMLEIAKAFSYDAKVVIMDEPTSSLTEKEVNHLFTIIKKLKEKGCGVVYISHKMEEIFSICDEITILRDGQWVDTRPLKGLDMDKIISMMVGRELTQRFPEKSNEPKNVILEVKNLTALNQPSIQDISFELRAGEILGVAGLVGSRRTDIVETIFGVRERSAGHILLHGREMKNHDAHEAIRNGFALVTEERRSTGIYSNLDITFNSLVANVDEYKTPYGLLSDKKMKSDTQWVIDSMRVKTPSHQTHIGSLSGGNQQKVIIGRWLLTQPEILMLDEPTRGIDVGAKYEIYQLILELAKKDKGIIIISSEMPELLGITDRIMVMSNGRNAGIVNTKQTSQNEILELASRYL

SEQ ID NO: 77270 - protein, 235 aa, Vibrio cholerae
MMKSSPLVRQASTEKESTKSENLTEYLIEAIVEGQLAPGSKISEPELAKQFQVSRGPLREALMRVEGLGLIERIPHIGARVIQLSPTKLVELYAVREALEGMAARLAARNITEIELAGLESLLSTHSTHIDQVEGASYFHQQGDFDFHYRIIQACRNQQLIGLLCDELYHLLRMYRYQSPRSHSRPVEALEEHKFILRAIRQRDEELAEMLMRRHISRSRQLIEQQIMLDAQQQG

SEQ ID NO: 77271 - protein, 377 aa, Vibrio cholerae
MSAAKELGGAGLRGQSAGSTALCTVGKTGTGLTYRGYDITDLAHHAQFEEVAHLLLVGYLPTQAELDQYKTRLIGLRGLPEKLKQALELIPAEAHPMDVMRTGCSILGNLEPEHTFAEQQAATERMLALFPAIICYWYRFSHEGVRIDTADQSEDSIGGYFLKMLTGQAPSELFKKVMHCSLTLYAEHEFNASTFAARVCASTLSDIHSCVTGAIGTLRGPLHGGANEAAMAMIEQWHSADEAEAGIMRMLASKEKIMGFGHAIYRESDPRNALIKEWSKALSEAVGDSHLYAVSERVEAVMKREKDLFCNADFFHASAYHFMGIPTKLFTPIFVMSRLTGWAAHVYEQRANNRIIRPSADYVGPEHQTWLPIEQRG

SEQ ID NO: 77272 - protein, 158 aa, Vibrio cholerae
MANISLSSASSADLQQLNQLMFELHDEHHQQCPEHFKTAEEIEQEKSIARYLDDPQCLVYVAKQGEQVVGFITGHFCELVSTVSQAVAMGSVDELYVLPAFRGQGIASQLCHKLERVFKDYGVKQMFVEVWDFNQSAQDFYQCAGFVQHIHWLRKPLV

SEQ ID NO: 77273 - protein, 1331 aa, Vibrio cholerae
MRSIKAMFVLLFCLMAILAVAMFKVTRQVADLRLESHQYSEQLFHFYRLSQELKQSSDHLTKFARAYASTGNERWLRMFNQVLNVRNGKLPAPSNNDYEFWDVVVLNDSSELTPNANQRYPTLIERIRQSGIGSVEFLELQNALALSDQLVALEREAFMAVKGWKREFAGEYRYTGEPDLNFARSLLYSEKYFLEKAKIMAAIGSAHSNIVDRIESEVRAADEKAQFYERVNLVLVSLSLLVIIASFILLWVIYIAPLSILLKTVVRQVRSEDYKFTLTQKAYGELQRFIDSLNVVFHHISEQLSFNTLVKDFNIIIRNHPTTEALCNQVTQFLLHHFPVELIGLYLYQNGVLTRIAGVGQSESAQRDYSDPTTTHCSVLRSGKPYAMKSLNGNFQVVSTSGVIALNEVYYLPLQVNNQPIALLELGTVGMLTMQQYHWLSQMLDDLSVAIQLSQNAEQQRLAERKVLEQSQLNQEILDATPNPMYCLSADGKFLTVNAKFLDLMGLYNNEVIDKEPQEIFPAEVAERFAAAHQVLTQQQSSQNYEVSLVDYTGVQREMLVYEASFSDRADKVNGIVGILLDMTERKEMEDELRKAKEAADAMSQAKGDFLANMSHEIRTPMNAILGMAHLALNTPLDTTQRKYVTRINESAKNLLGIINDILDFSKMEAGKLNVERIDFNLDDVLDNVTAVVSLKAQEKGIEFLMDIDPHIPLGLIGDPLRLGQVMVNLCGNAVKFTSQGEIVLSARVSQLNEQQVTLRFAVKDTGIGIAQDKLDDLFDAFSQADNSITRQYGGTGLGLSISKQLVELMGGQITVHSEEGKGSTFEFSVVCGLQDAKMRDISQPVHGLADKRVLVVDDNDSARHILDSLLTAMRFNVVTVSNGFEALSEIQQKPFDMLFVDWNMPGMNGIELLTRVKTLGLRGHMKSFLVTAYGREINLDGENSKLVDALIVKPVNPSNLLDAIVTSYGIEHVRHKTNEAHHNSRPNFAGQSLLLVEDNEVNQEVALGLLQDTGLNVVVANHGQEALERLEHADFDLVLMDMQMPVMDGITATEHIRANPRWHSLPIVAMTANAMAIDIERCLQAGMNDHLSKPIEVDKFYQVLRHFLQVSDEQSFSSHSPNKPSASKPAMNALLDLPQLTGVDLEQAIFRIGGNQQRYFEILRHFIDSQVDELNSVTGLIEAQDWSSATRVAHTLKGSAANLGLEALAQLAAEMEQSLEQQVLPSFELLQQAQSLLTQVDDELSAWEHQHKEPLLAENLDWGLWYQQLQQAINDYDVTALSLSKSIRQVSQWDSAQQAALISAIEDFDFEQAKALLASYPQLSGERLNQ

SEQ ID NO: 77274 - protein, 418 aa, Vibrio cholerae
MLFFISSTTIAAHFYFHLSSVMTPAIYLVKGRDKSLRRKHPWVFSRGISKVEGTPKLGETVDVYSFEGKWLAKAAYSPHSQITARVWSFEQEPIDRDFFIKRIEQAQLLRNDIIERDGLTGYRLIAAESDGLPGITIDKYQDYLVCQLLSAGAEYQKQTLVEALLHCFPECHIYERSDVAVRKKEGLDERVGVLHGELPPKSVVIEENGVKISVDIVGGHKTGFYLDQRDSRFQSMKYVKEKEVLNCFSYTGGFGLYALKGGAKRVINADVSQPALDTAKFNAELNGFDISKKRAVFLNADVFKLLREYRDQGTRFDVVVMDPPKFAESKAQLDGACRGYKDINMLAMQILNPGGTLLTYSCSGLMDQVLFQKIIADAALDAGRDVKFVERFEQAADHPTDTAYPEGFYLKGFACKVL

SEQ ID NO: 77275 - protein, 273 aa, Vibrio cholerae
MYKLIALDMDGTLLNSQKQISPRTKQAIAQARQQGIQVVLASGRPLDGMRSKLEELHLTTENDYVLYYNGSMVANVGTGEIIHQQIIDGKAAKRVATLAQEFGLNTHAFSQIHGLITPKTSQYTEVEASINGLNITEMDFAQLADDHPIIKAMIVGEPEKLTQAIAQLPAQWREEFTVVQSAPFFLEFLNTGSNKGIGVQAIAAHLGIQASEVICMGDAENDHHMLQYAGLGIAMANAMEETKHIADHITLSNDHDGVAVAIERFALGCFSEA

SEQ ID NO: 77276 - protein, 392 aa, Vibrio cholerae
MHSGRPSMMDLSFLEIATVINNIACSAIAALFLYMLRSKLIEHKLDTATWFVLLFLAYGLAYTTSSLRFILPMGFAIFVNNLLYQLGGYCMLFAVLRWYQKPIKSGLYLLMMAHSLLFALLLYLLFRLNPEDIGLRILIASLSLSSVYLISAIVAAKNGQRGRPEQTLFAVVLAMMMVMLYVPFVAYQTLPLLAVFRASTIVVQNLFFFIILGTMLMLFLFEEIEWHRLRSIQDELTGAFNRRHFKEQVQQKLKQSKQKSMVALVDIDHFKQINDSYGHDIGDSVITYVVRHLESLALTECLVARYGGEEFAIFARENDFERVSQALDSVRDAISVGFHVEQQPLKVSVSIGAVIFESSHEYGEVLRQADKALYQAKQQGRNRIMLQDVSAS

SEQ ID NO: 77277 - protein, 450 aa, Vibrio cholerae
MFIGFDYGTANCSVASMQDGRPVLIPLEGDSLYIPSTLAAPTRESVSEHLFRHRHIAPADALGEQLLRRSVASNREEGIDLQFADVVFGQAALDLYLSDPHEVYYVKSPKSFLGAMGLHDIQLSFFEDLVCAMMANIKAQAEAHSDAVIQDAVIGRPVNFHGRGGEDSNQQAENILRRAATRAGFRHLEFQFEPVAAGLEYEATLTEDKTVLVVDIGGGTTDCSLIQMGPSWRGKADRTQSLIAHTGQRVGGNDLDIHLAFKALMTPFGFGTQTQSGLDMPITQFWNPIAINDVSAQAKFFSRENLADLKRLHKEAREPEKLARLLAVYHDTLGYSLVKKAEEAKIALSDTARAIAQIKVLSELLEVEIQREAMIEAIDVPKTKMIELVTEAVTLGGVTPDVIFMTGGSARSPILRAGVEQALPNVPIVSGNYFGSVTAGLARWAQVCFR

SEQ ID NO: 77278 - protein, 641 aa, Vibrio cholerae
MALKKHITTSASSSFSPSNHSTSANAPKKEADDLRRQARTLARKQQAAERVASATAELLAGLEESSSAMTQLRSSMEQIAVGAEESSSATKQSETAVSQMNNFINEQATYATQSKQILTKLEQDIVDVANKINEMVSNVQTSSERQNDSVKRMIELSEQAAKINDAVKQVIHIADQTNLLALNAAIEAGRAGKHGKGFAVVADTVRTLAEKAEKNAANIESLIKDISNGAEMVSNGVKSSSQKAESEVQKGHVVNKQLTLIRNEMVDLVKDSEVLLKAADEMSSAAVIALKGSESVSQAAQEQSAACEESLKSLDQQQIALDGAVTAAQSLDELTDELRTSTDIVKSSEEVAAAAEELSAGIEEINRSSNEIMGALNQISSGAQHMAKSVETGITSLTQIEQGARLGKERAESSLKACEKMLTGIEENKTTVDEMILAITESTKAATENLNEMANIERISRQIDKIVDGISNVSIQTAMLAVNGAVEAARAGEYGKGFAVVSTDIQNLANDAAENAEQIKDQVKNIQEQINIVRKDLADILSTVMEEAQKAALTIKQLDNVRSRMSDVVLGSKRISESAGGIERSIADARAGMQQIATAAEESSHATGEAATAARQQSSSTSELASAIENIAAVADELQSI

SEQ ID NO: 77279 - protein, 406 aa, Vibrio cholerae
MKQQNLNRLSSMNSNNSNTEFDGVRAAQSRKKGFLGLAAAIVVAGGSYALYWHFIGSRYISTDNAYAAAEIAEVTPAVGGIIAQVNVVDTEYVKQGDVLVQLDDTDARLALLQAEADLALAKRRVRSYLANDEGLSAMVEAQEANEQRVKAQLKAAQADFERAKIDLSRREDLVRSGSVSGEELTNAKTGFAQAQANLNAAKAAMAQAQATKLSTIGSQKANAALTDNTTVDSNPEVLLAKARYEQAKIDLERTVIRAPISGIVAKRQVQVGRRVQVGMPLMTVVPTDHIYVDANFKEVELRDVKVGQPVTLTADLYGDDVTYHGVVAGFSGGTGSAFSMIPAQNATGNWIKVVQRLPIRIELDPKDLQAYPLQVGLSMVATIDTAGTTDPQTLVQYRAAKVSEQG

SEQ ID NO: 77280 - protein, 524 aa, Vibrio cholerae
MMKKRASHHLVICTLIDTLRFRLSSRKAISMNAFNKLVKHSKKISNFNHLSSIVGWDQAAVMPSGGAEARSQAMAELSVHIHGLMTQPQLADWFAEAESETLNIEQQATLREMKRQWQQATVLPEALVEAQSLAGSKCEHAWRSQRKNNDWTGFEKNWAEVVKLSQEEAQIRAEATGKTPYDAMLELYEPGTTTEQLNRVFSDVKTWLPSLIDVVIEKQSSESFIAPKGHYPAESQKALGLDVMKLLQFDFNHGRLDESVHPFCGGVPSDVRITTRYNESEFVQSLMGIVHETGHARYEQGLPKHLAGTPAGEARSMGIHESQSLFFEMQVGRSPAFIAHLAELAGKHFSAMNDPVFRVENIQKLYTRVQKDFIRVDADELTYPAHVILRFEIERDLMNGKIKHTDVPELWDQKMQAYLGLSTKGNDQNGCMQDIHWTDGSFGYFPSYTLGAMYAAQFMAAMKKTVDVDGAIRRGDLSPIFTWLSENIWSKGSLFSTDELVKQATGETLNPEHFKAHLSQRYLK

SEQ ID NO: 77281 - protein, 1163 aa, Vibrio cholerae
MATLAYSIEVEGLEDETLVVRGFHGQESLSNSVFLGQACYGFRYEVQLASRVSNLTAEQMVDKRAELKLYRNSQLVQRVHGIVRAFSQGDIGHHHTFYQLTLVPALERLSLRHNSRIFQKQTVPEILSILLQEMGINDYAFALKRDGVQREFCVQYRESDIDFLHRLAAEEGLVYSFVHEAGKHTLYFSDASDSLSKLPEPIPYNALVGGAIDTPYIHGLTYRTQAEVSEVQLKDYSFKKPAYSFLQTVQGTELDYQQTRYQHFDAPGRYKDDVNGAAFSQIRLDYLRRHAHTATGQSNEPLLRAGYKFDLQEHLDPAMNRDWVVVSINHQGEQPQALQEDGGSGATTYSNQFSLIPGHLHWRAEPQPKPQVDGPMIATVVGPEGEEIFCDEHGRVKIHFPWDRYSNGNEQSSCWVRVSQGWAGSQYGFIAIPRIGHEVIVEFLNGDPDQPIITGRTYHATNTPPYTLPEHKTKTVLRTETHQGEGFNELSFEDQAGKEQIYLHAQKDFDGLIENDHTTVIRHDHHLTVENDQFTQIKHNQHLTVEWESREAVTGEQVLSIEGSLHVKTGKVWVNEAGTEIHVKAGQKVVIEAGSEITVKAGGSFVKVDPAGVHLSGALVNLNSGGSAGSGSGFGGAMPALPGGLEPAVALAPPQTISYQALLQAEQANVPAVKVCPLAAQEATPAVNSITPPPPPPIAPPMAPPQPIMNPQPTANAQPNLGRSTKATPDFPTHFPKSSIGIENELAGLVVAMPANSAQKFGYVKSAQGDALFMLTKDMNQGSYQRPPSLQDGKNYQNWQTHTVELVSYPCEMDDKAAVETRKQAMLWLATHFTTHIDQSNHQPLAPIQSEDGRFVIEITNAKHVIAAGNGISAESQGQTITMTPSGQQATVGVAAKGFGTSATPELRLLESAPWYQKSLKSQFASLTSAENLDDKELAANVFAYLTSIYLKTAELAKKFGIYINEWDPMSEQITPNANGLTDPKVKNAWEILPRTKPSKIVEILSKSDAKAVMKHIKPQLQSRYSESLSKNVFQYFQDGGEVAGHGINNATVGDKHSPELAILFEFRTVPNELQSYLPKTESTTKSEVKLLDQFDPMKRKTVIQQVESLVQNSGDAFDKWYQSYRDSMNQPPVKNAKKIASANQKAQWVKEHNPQEWQRIIA

SEQ ID NO: 77282 - protein, 345 aa, Vibrio cholerae
MKNKLFASALCAAALFTTNAMAKDQELYFYNWSEYIPSEVLEDFTKETGIKVIYSTYESNESMYAKLKTQGAGYDLVVPSTYFVSKMRKEGMLQEIDHSKLSHFKDLDPNYLNKPFDPGNKFSIPYIWGATGIGINTDMLDKKSLKNWGDLWDAKWAGQLMLMDDAREVFHIALSKLGYSPNTTNPKEIKAAYRELKKLMPNVLVFNSDFPANPYLAGEVSLGMLWNGSAYMARQEGAPIQIIWPEKGTIFWMDSISIPAGAKNIEAAHKMIDFLLRPENAAKIALEIGYPTPVKTAHDLLPKEFANDPSIYPPQSVIDNGEWQDEVGEASVLYDEYFQKLKVND

SEQ ID NO: 77283 - protein, 366 aa, Vibrio cholerae
MTEVILFFFATPKRATFSLELTSMKKLATLLAGSACALSLLSGTAAAEDKELVFMNWGPYINSGILEQFTKETGIKVIYSTYESNETLYAKLKTHNQGYDLVVPSTYFVAKMRDEGMLQKIDKSKLSNFKNLDSNYLDKPYDPNNDYSIPHVVAITGLAVNTDMYDPNDFQSWGDLWKPELKGQLMLMDDTREVFHIALRKLGYSGNSTDDKQIDEAYAELQKLMPNVLVFNSDNPAAPYLSGEVGLGMLWNGSAAAAQKEGLPIKLVFPKEGGIGWVDNFAISSGAKNVDAAHKMIDFLLRPEIAEQISRDTGYLTGVKASNDKFQDVAPLFPSQEDLDRVEWQSAVGDKTVKYEEYFMKLKAGQ

SEQ ID NO: 77284 - protein, 224 aa, Vibrio cholerae
MSPDYLGAWVVGLLGAGHCLGMCGGISALLTLDPSKSSPALLLYYNLGRLLSYALIGGIVGGITASLTELIDVQSALVWLRIFAAVLMIVLGLYIGRWWFGLLWLEKVGQKIWRWISPLGKTLLPLKKQWHALPFGLVWGWLPCGLVYSMLTWSAVAGSFSQGALIMLSFGFGTLPAMLASGWGANKLMHWQNSHLFRQCAAILVIGYGLFTAYDAVKLMINLG

SEQ ID NO: 77285 - protein, 477 aa, Vibrio cholerae
MQMSQEKQLEQNYNYTVVRQFTLVTILWGIVGMAVGVLIAAQLVWPQLNFDTPWLTYSRLRPLHTNAVIFAFGTSALFATSYYVVQRTCQTRLFGGPLVPFTFWGWQAIIVSAAITLPLGYTSGKEYAELEWPIDIAIAAVWVAYAVVFFGTLVKRKTSHIYVANWFFGAFIITVAVLHIVNSMALPVSMGKSYSIYAGAVDAMVQWWYGHNAVGFLLTAGFLGMMYYFVPKQAERPVYSYRLSIVHFWALISLYIWAGPHHLHYTALPDWTQSLGMVMSLVLFAPSWGGMINGIMTLSGAWHKLRYDPILRFLIVSLSFYGMSTFEGPMMSIKTVNALSHYTDWTIGHVHSGALGWVAMVSIGSVYHLIPRLFGQERMYSVSLINAHFWLATIGTVLYIVAMWISGVMQGLMWRAVNSDGTLTYSFVESVQASYPFYTVRFIGGFIFLSGMFLMAYNAYKTISAPKNSLKAIVQPA

SEQ ID NO: 77286 - protein, 4558 aa, Vibrio cholerae
  MISC_FEATURE (3773)..(3773): X=any amino acid
  MISC_FEATURE (3940)..(3940): X=any amino acid
  MISC_FEATURE (3948)..(3948): X=any amino acid
MVFYLIPKRRVWLMGKPFWRSVEYFFTGNYSADDGNNNIVAIGFGGQIHAYGGDDHVTVGSIGATVYTGSGNDTVVGGSAYLKVEDSTGHLIVKGAAGYADINKSGDGNVSFAGAAGGVSIDHLGNHGDVSYGGAAAYNGITRKGLSGNVTFAGAGGYNALWHETNQGNLSFTGAGAGNKLDRTWSNRYQGSHGDVTFDGAGAANSISSRVETGNITFRGAGADNHLVRKGKVGDITLQGAGASNRIERTHQAEDVYTQTRGNIRFEGVGGYNSLYSDVAHGDIHFSGGGAYNTIIRKGSGNDFAKEGMTNAKADEIVLTKAVMSGSWIGQDHHVTAVKSASEPNTYLFAFADSTYTKINKVQLRNDPQTGELKYYSTAWYKEVNHLSNLANQDISDNGGFTAVNINGAYTLSDLKVEHQQSVTVHAVEKSLTEYEWVTYANGAVIDAKEVSLSDAKMGGHAIYADGTKVDVKAVKSNRQPNTYIYAKVLGPYTKIVVVELANDPETGALKYQARSWYKEGDHTANIANQDISSATGYNPMGKGGYSLSDLHYSVNAVRSTSETVADIEEYTDQTLFKPANDSGESSGDVRFNGAGGGNVIKSNVTRGNVHFNGGGIANVILHSSQFGNTEFNGGGAANVIVKSGEEGDLTFRGAGLANVLVHQSEQGKMDVYAGGAVNVLVRLGDGQYLAHLLAYGNISVQKGSGDSRVVMLGGYNTHTQIGSGNGLWLAAGGFNVMTQVGKGDVAAVLAGGANVLTKMGEGELTSGMLGGANVITHISNDDQLSNTTAVALGGANILTKKGKGNTLAVMGGGANVLTHVGDGTTTGVMVGGANILTKVGNGDTTGILLGVGNVLTHVGDGQTLGVMGAAGNIFTKVGDGTSIAVMIGAGNIFTHVGEGNAWALMGGLGNVFTKVGNGDALALMVAEANVFTHIGDGMSVALMLAKGNVATKVGNGTTLAAMVGNVNIFTHIGHGSTFAAMIGQANIMTKVGNDLTAALMVGKANIMTHVGDGTSLGLFAGEVNVMTKVGNGTTLAAMFGKANIMTHVGDGLTGVLALGEANIVTKLGDDFMGVVAAAKANVVTHVGDATTAAVLAGKGNILTKVGEGTTVGLLISDVGNVMTHVGDGTTIGIAKGKANLITKVGDGLGVNVTWGQANVFTQVGDGDRYNFAKGEANLITKVGDGQEVSVVQGEANIITHVGNGDDYTGAWGKANVITKVGHGQNVVLAKGEANIVTQVGDGDSFNALWSKGNIVTKVGDGMQVTAAKGQANITTTVGNGLNVTAAYGDANINTKVGDGVSVNVAWGKYNINTKVGDGLNVAVMKGKANANIHVGDGLNINASYAQNNVAIKVGNGDFYSLAVASSNTSSNKLSALFDNIKQTVLGVGGSQAINYLVQGDEASSSGTHKGRGAIATPEITKLDGFQMDAIKEVSSDLGDSLTGSVTKVDTPDLNKMQHALNVDDSSVQAPNLIVNGDFELGEHGWQSTHGVEASYAGSVYGVEGEGHGARVTELDTYTNTSLYQDLANLAQGEVIAVSFDFAKRAGLSNNEGIEVLWNGEVVFSSSGDESAWQQKNLKLTAQAGSNRIEFKGTGHNDGLGYILDNVVATSESSQQANAIREHATQNPAAQNALSDKERAEADRQRLEQEKQKQLDAVAGSQSQLESTDQQALENNGQAQRDAVKEESEAVTAELAKLAQGLDVLDGQATHTGESGDQWRNDFAGGLLDGVQSQLDDAKQLANDKIAAAKQTLSDNNSKVKESVAKSEAGVAQGEQNRAGVEQDIADAQADAEKRKADALAKGKDAQQAESDAHHAVNNAQSRGDRDVQLAENKANQAQADAQGAKQNEGDRPDRQGVTGSGLSGNAHSVEGAGETDSHVNTDSQTNADGRFSEGLTEQEQEALEGATNAVNRLQINAGIRAKNSVSSMTSMFSETNSKSIVVPTKVSPEPERQEVTRRDVRISGVNLESLSAVQGSQPTGQLASKSVPGFKSHFASTSIGIENELSGLVVVLPKNSAQTFGYVHDSQGNPLFMLTKDMNQGGYSNPVGINDIQGVNNWQTHTIELVTYPSEISDTAAVESRKEAMLWLAKEFTDHINQSNHQSLPHLVSDDGRFTLVISNSKHLIAAGNGTSIDAQGKTIGMTPSGQQATMAISAKEFGTSSSPEVRLLESAPWYQAGLRDEFLANAKNTTLDDPATAQNVYAYLTSVYSKTADLAKEYGIYINDWDPASEGFSPNAQGLTDPKVKNAWSILPRTKPVRMLELLSAEDSRYVRQQIAEKLKGTYSESLAKNVFEYFQYGGEVAGHGINNATTGSVQQPEPAILFEFRSVPSALSDFVPKTASTVKVDVKALDHFDSASRKAIITEVNALVSGSEDFDAWYQEYRASKGQPPVKNPKSSASANHKAEWLMTQHAEQWAKITAPYTDNHETLTSTKLASNDKEELHALGETSNLENNKQQENVASIINTMLNDMLPFYALRTERNLLVQEGDEGFEVRAWPGTEDKSKTIILEDPEDAAQHKAIERFILANFDNFEQMPDELFLVDNKVISHHEGRTHVLAQKVDGAWQYNATVELMSVTELLDAANVTGKIRGESYQQVIDALTDYHASITEHADYEPESVEKLLNLRKKIEGYVLGHPDSGRVEAMNSLLNQVNTRLDEVSLLSVAEQTIQAQNSFSRLYDQLEAANLKESKHLYLDQNGDFVTKGKGNLANIDLLGSREAVLEKVKLTVSNEYGQTVADTIFAGLSAKDLAKDGKGVDIAGLNKVHQAIEQHLSPVSATLYIWKPSDHSALGHAALQIGQGRTQLEGQAAADFNQQNYVSWWPLGSKSSNISNILNVATKDQPDLKLRWSDFSQPAHQNDTLEHDVASEENDGFGLHDGDIKLKRFIEKLNAAKGIDASFKEASEGYASVLLGNPDMLETTSIPAHVFQPFVEQWNDTSYDMMDVAHRFAQELRLQAQRSDDPELLEKRIGNVIRQFAERALEEIETFKASQADQGRVFRINLEGLDVAAMQAEWHRLSNDPDARYQLLTKNCSSTVAKVLKAGGADKLIGHTWLPKFGVWTPTELFNFGQALQEAQLEIAAKKQSHQVTDVLDALSGNEKPKENVAIENDGTPPRDKESLSPLTRFLNNELYGDKEARRKIGEITQTLLDHAVEKGESQKITLQGEAGRLTGYYHQGTAPSEGETSSPSGKVVLFLHGSGSSAEEQASAIRNHYQKQGIDMLAVNLRGYGESDGGPSEKGLYQDARTMFNYLVNDKGIDPSNIIIHGYSMGGPIAADLARYAAQNGQAVSGLLLDRPMPSMTKAITAHEVANPAGIVGAIAKAVNGQFSVEKNLEGLPKETSILLLTDNEGLGNEGEKLRTKLTASGYNVTGEQTFYGHEASNRLMSQYADQIVSGLSSSASVDEDLDQQGLDTTSTKDQGISNKNDHLQVVDSKEALADGKILHNQNVNSWGPITVTPTTDGGETRFDGQIIVQMENDPVVAKAAANLAGKHAESSVVVQLDSDGNYRVVYGDPSKLDGKLRWQLVGHGRDHSETNNTRLSGYSADELAVKLAKFQQSFNQAENINNKPDHISIVGCSLVSDDKQKGFGHQFINAMDANGLRVDVSVRSSELAVDEAGRKHTKDANGDWVQKAENNKVSLSWDAQGEVVAKDERIRNGIAEGDIDLSRIGVNNVDEPARGAIGDNNDVFDAPEKRKPETEVIANSSSSNQFSYSGNIQVNVGEGEFTAVNWGTSNVGIKVGTGGFKSLAFGDNNVMVHIGDGESKHSVXIGGYQALEGAQMFLGNRNVSFNFGHSNDLILMMDKSIPTPPLVNPFDGAARISGVLQGIATSGEGEDWLAAQEQQWTLSGAKKFVKDMSGLDQSSSVDYTTLVELDSQNERDSRGLKHDAEATLNKQYNQWLSGNGNSGTSQLSRADKLRQANEKLAFNFAVGGQGXDIQVTTGXWNFMFGDNIQSILDTNLGSLFGLMTQQFTATGQAKTTFTYTPQDLPRQLKNKLLGQLAGVGAETTLADIFGVDYTASGQIVSRNGQAVDGVAILKEMLEVIGEFSGDQLQAFVDPAKLLDSLKAGIDMGADGIKSFAETHGLKEKAPEEEKDNSSVSVNGANVNSAQGATVADGNTETAETQDRAFGFNSLNLPNLFATIFSQDKQKEMKSLVENLKQNLTADLLNMKEKTFDFLRNSGHLQGDGDINISLGNYNFNWGGDGKDLGAYLGDNNNFWGGRGDDVFYATGKSNIFTGGEGNDMGVLMGRENMMFGGDGNDTAVVAGRINHVFLGAGDDQSFVFGEGGEIDTGSGRDYVVTSGNFNRVDTGDDQDYSVTIGNNNQVELGAGNDFANIFGNYNRINAGAGNDVVKLMGYHAVLNGGDGDDHLIATAISKFSQFNGGEGRDLMVLGGYQNTFKGGTDVDSFVVSGDVIDNLVEDIRSEDNIVFNGIDWQKLWFERSGYDLKLSILRDPSNDSDQSKFEHIGSVTFSDYFNGNRAQVVIGMSEKDLSGEREYTMLSDSAIDALVQAMSGFEPQAGDNGFIDSLESKSQAAISMAWSDVVHKKGLMV

SEQ ID NO: 77287 - protein, 639 aa, Vibrio cholerae
MALITIHNGLLAFGDHPLLDHADFALQENERVCLVGRNGAGKSTLMKVLAGEILLDDGKMQVMQDVVVSRLEQDPPRNQAGTVFDYVSGGLQGIGEQLKIYQDQLDLVATDPSESNINKLAHIQEQLEVSGAWRFEDRIKNVLGSLKLDGHTKLTDLSGGWQRKAALARALACDPDVLLLDEPTNHLDVTTIEWLEGFLKDFRGSIIFISHDRAFIKSMATRIVDLDRGQLSSFPGDYENYLTEKEEMLRVEELQNAEFDKKLAQEEVWIRQGIKARRTRNEGRVRALKRLRQERSERREVQGKVNLQIDDSNRSGKIVFEAENLHYSIGGKTIVDGFSFNIMRGDRIALIGPNGCGKSTLLKILLGDLQPDSGKVHCGTKLEVAYFDQYRELLDPEKTVIDNLADGKQEVMVGGRLRHALSYLQDFLFSPKRARTPVKALSGGEKNRLLLARILLKANNLLVLDEPTNDLDIETLELLEELLANYQGTLLLVSHDREFVDNTVTSSWIFEGDGKIEEFVGGYHDAQQQRAQVLQSRAAENIVKKEKVVEESPKSAPSKTKQKKLSYKLQRELEALPQRLEELEVEIAALQDIVNSPDFFSQPVDKTQPILDKLTATEQELEIAFERWEELEAMQQESE

SEQ ID NO: 77288 - protein, 1613 aa, Vibrio cholerae
MTARETLMPVLLEKVYQLIQDKLELAQQPLVTQLGQHLFSNISQDDLVERNESDLYGAVLSLWHHINEKKADERSVRVFNPTVSRQGWQSTHTIVEIVLPDSPFLVDSIKMALSRLGLASHLMLNGPAHIARHDDGSIKSINQGEGQLTSMFHIEVDRLSSKEEMTELKNELLDILHDTALVVKDWKPMATKLEQVINQLEADKKQIPVEAERLQETIQFLRWLGNHNFTFMGYKEFDLVEKNGDTELTPTKDTGLGLFSDNERVRSVKLSQFPDSARLEAKKPFLLILTKGNKQSRIHRPAYTDYIGIKKFDAKGKVIGEHRFTGLYTSAVYNQSVEGIPLIREKVGRILAASGYRQGSYAYKALHNILENYPRDELLQAREEELLEVGMGVVQMQDRDLLRLFVRKDPFGRFFSCMVYVTKERYNTELRRKTQQVFKQYFGCEQDVEFTTYFSESPLARTHYIVRVDNNNINVDVKKIEQNLMEASTSWDDRLAEAIVANFGESRGLPLSKEYQRAFPRSYKEDVMPGSALADIEHLEALDEHNKLGMLFYRLQETAKDSKAVRLKLYHKDEPIHLSDVMPMLENLGLRVIGESPYEVVKANGQVYWILDFSMLHKSDKQVDLREARDRFQQAFAAIWAGELESDGFNRLILGASLSGREVSILRAYARYMRQVGFPFSQHYIEDTLSHHPDLAQGLVDLFVRRFDPKYKGGEKGQAEIIKSLTEQLDQVQSLDDDRIIRRYMEMINATLRTNYYQLDEHKQNKPWLSLKMKPSEIPEIPAPVPAFEIFVYAPDIEGVHLRGGKVARGGLRWSDRQEDFRTEILGLVKAQQVKNTVIVPVGAKGGFVCKKQYLYTTRDEIFAEGQRCYKRFIRALLDVTDNIIEGQVVPPKNVVRHDEDDPYLVVAADKGTATFSDLANSVSAEYQFWLGDAFASGGSNGYDHKAMGITAKGGWESVKRHFREMGIDCQTTDFTAIGIGDMAGDVFGNGMLLSKHIRLLAAFNHIHIFIDPTPDSASSWEERNRLFNLPRSSWEDYNPKLISKGGGVFSRKAKAITLTPEMQKMLNTKKTTLAPNELIKMILKMEVDLLWNGGIGTYVKSSIETHTDVGDRANDGLRVDGREVNAKIIGEGGNLGMTQRGRIEFALKGGRVNTDFVDNVGGVDCSDNEVNIKIFLNGLVANGDLTLKQRNQILESMKDEVGSIVIEDAYGQSESISVTEAQGVSLMKEQIRFIHHMEKAGYLDRALEHIPDDETLLERERQGMGLTRPELSVLMAYGKMALKEELASEEIAQDEFHAKQLVNYFPTELRGHYAQQMVNHPLRVEIIATALANQMVNEMGCNFVTRLQEETGSSVVDIANAYAAAREIYGLGIVLEKVRKLDNIAQSSAQYDVMFLVRRTLRRLTRWLLRNRTGKPSVIAMVERYQEDVKAITEQLDKVLVKEEIVEHNSMAENWIEKGIEKELAHYVARLSSLYSVLDISAVAKEKGIAVTQTAKLYFHLGDRLSLHWFLKQINHQAVDNHWQALARASFREDLDWQQRQLTAQVLSSNLSDAQQEIELALDKWLERNQVSISRWENILSEFKVGTVHEFAKFSVALRELTLLNLNCLTVE

SEQ ID NO: 77289 - protein, 868 aa, Vibrio cholerae
MAHTPQAKYRLDYQPPSHTITDIDLVFDLYDDATLVTAVSQVKQQQESNTLILDGETLELKVLKVDGQDWQDYSVGEASLEIRGLPSEFTLTVVTKINPQANTALEGLYKSGGAFCTQCEAEGFRRITYYLDRPDVLARYTTTVIADKAQYPYLLSNGNKIAQGEQEAGRHWVKWQDPHPKPAYLFALVAGDFDVLRDQYVTQSGRQVALEIFVDKGNLDRAGHAMTSLINSMRWDEQRFGLEYDLDIYMIVAVDFFNMGAMENKGLNIFNSKFVLANEKTATDTDYLGIEAVIGHEYFHNWTGNRVTCRDWFQLSLKEGLTVFRDQEFSSDLGSRAVNRIGNVRIIRGPQFAEDASPMSHPIRPDKVIEMNNFYTLTVYEKGSEVIRMMHTLLGEEKFQRGMKLYFKRHDGTAATCEDFVAAMEEASGIDLQQFRLWYSQSGTPTLKVSSTYHAASQTYELTVEQHTEPTHDQKEKQPLHIPLDIELYAPNGDVIALQCNGKPVSNVLDVKQAKQTFRFEQVKQPPIPSLLREFSAPVKLEYAYSDEELIFLMVHARNEFARWDAGQMLLAKYIRTNVERVQRGQPVELAESVIDAFRGVLLSDNLDAEFVAEMLSLPSHNEVSGWYKRVDVDAIAQVLTSLKTILATELEDELSATYHTLKQDTYSIEHAAIGKRTLRNVCLSYLAYTAQGNALVQKQYAQANNMTDTIAAMTAANQAQLACRESLMQDYSEKWKHDGLVMDKWFTLQGSNPSPQVLDVIQQAMQHEAFSLKNPNRTRSLIGAFLNANPVNFHAKTGEGYRFAGHILRELNSSNPQVASRLIDPLLKFRLYDEQRQALIKQELEQLKAMDNLARDLFEKVSKALEA

SEQ ID NO: 77290 - protein, 610 aa, Vibrio cholerae
MRITKIGCILINMTYFNDTISRSWLITQVKKHRAKLLFANFIAVVATLISVPIPLLMPLMVDEVLLNHPAKGVEVMNQFLPQGWQTATGYIMLTLLMVVVMRIASQLLNILQSRQFTLVSKTITYEMRRKMIEKLGRISIRQYETRGSGGINAHLITDIETIDQFIGSTLSKFLISLLTVIGTAIVLLWLEWRLGLFILLVNPIVIYFSRMLGSQVKHLKKRENQAFERFQNRLVETLDGIYQLRAANKEREFLNRLISDADAVRENADKYAWQSEAAGRLSFLLFLLGFELFRAVAMLMVVFSDLTIGQIFAVFGYLWFMLSPVQELLGIQFSWYAAKAALKRINSLLELEEEYRPISKVNPFTQLGEVDIEINNIHFSYDGESQVLNDLSLHIPAGKKVALVGASGGGKSTLIQLLIGVYRAQSGAIRFNGQHCDDISFDVIRDQIAVVLQQPILFNDTLRHNLTLGGQFSDDVLWQALDIAQLQDVITKLDQGLESQIGRNGIRLSGGQRQRLAIARMVLSNPKFVILDEATSALDTATEAALHLALSKFLHGRTTLIVAHRLSAVKQADLIYVLEDGHVSQSGTHHELLEQEGLYQTLYGSVQSQH

SEQ ID NO: 77291 - protein, 530 aa, Vibrio cholerae
MISTANITQQFGAKPLFENISVKFGEGNRYGLIGANGCGKSTFMKILSGELEPSGGNVSYDPNERVAKLNQDQFAYEEFTVIDTVIMGHKELWKVKQERDRIYALPEMTEEDGMRVADLEVEFAEMDGYMAESKAGELLLAVGIPLEQHYGLMSSVAPGWKLRVLLAQILFADPDIMLLDEPTNNLDIDTIRWLEDTLNARNCTMIIISHDRHFLNSVCTHMADLDYGELRIYPGNYDEYMTAATQARERLLSDNAKKKAQIAELQTFVARFSANASKAKQATSRARQIDKIKLDEVKASSRQNPFIRFEQSKELFRNALIVENLSQGFDHDLFSNFNAIFEVGERVAIIGENGVGKTTLLNTLAGVLEPRSGMYKWSENSNIGYYAQDHAHEFAEDLNLMEWMGQWRQEGDDEQVVRSFLGRMLFGQDDIKKSVKVLSGGEQGRMLLGKLMMHKPNMLLLDEPTNHMDMESIESLNNALEQYKGTLFFVSHDRVFVDSLATRIIEIRDGKITDFKGTYAEFLKSRGVEG

SEQ ID NO: 77292 - protein, 677 aa, Vibrio cholerae
MKAKWAWWQKWRHRFQTTVRYRLWILTSAPIFLTLLALIAITIYWSLHYTWNSALIDVSERLGVAQNSVTLLQQKQANHVRAFAESYDFRKRLQEPETLSTLPRWVQNQKNRYGLDFLSFERVDSLEQKFRYLDLTKRESFFDVLSADELEKLDPDLAKQAQIPILNSQQIETRGLVSRTVIPVRNDFGEIIGFLDGGLLLNNSTTLVDQIRDLIYPSHQDQLRPTGTLTLFLDDLRVSTNVPLDSNIHAGRAIGTRVSSEVFNQVLKGGQQWVNLAYVYDAWYITAYEPIRDQYHNEIGMLYTGYLMWPFLKAYVTNILEVGIITLFLLVISGLFVYRGSRDLFRPIERIHRVVKMVQLGKNQRIGQIGLDDKHELAQLAKQFDNMLDQLQQRNEEIVQAAHELEAKVQSRTASLQEKTAQLEHHIALLNQTRNKLVVHEKLAALGELTAGIAHEINNPTAVILGNTELIRFELGADASRVEEEIDAILLQIERIRNITRSLLQYSRQGGVQDEITWQHVNPIIDESITLVKTGSKKRDIEFVLELKAHNSVEVNRHQLLQILVNLQMNAIHAMNGKGRITIRSEDWVEEGQNRGAVIHIEDQGCGIKPENLKRIFDPFYTTKREGTGLGLSVSQSLLSQSGGEIKVQSELGVGSTFSIFLPSKNEAKLRETLLLQ

SEQ ID NO: 77293 - protein, 606 aa, Vibrio cholerae
MIASAHQNPQRPNLPLLGFAAYSGTGKTTLLEALLPKLTATGLRIGLLKHAHHDFDVDKPGKDSYRLRKAGASQMLIASRNRHALMTETPDAEAEFDYLLTRFDAEKLDVILVEGCKNIAFPKIELHRAEVGKPWLYPHDKNIIAIAADETVATDLPQMHINDLDAIADFVLDYVNKWRAQQIQPHTVSDSKNNAAACCDTLSPAFLSVEQGREKILSLISPLAETESVAIQECYQRVLAREVFSPNNVPAYRNSAMDGYALRSDDLERDSYRVVAEVLAGSHYPKTVERGEAVKIMTGAPMPLGADTVVMREQATQNGELVSFAGAKIKAGQNVRQAGEDLAQGQAVFSIGQRVLSPEMGMLASLGFAHADAFRSLKVAIFSTGDEVQAPGGDIEPNSIFDSNRFTLTGLLKQLGCQVIDLGIIEDDEAKMMQVLEQAAKQADVVITSGGVSVGDADFIKSALEKLGQIDFWRINMRPGRPLAFGQIAGKPFFGLPGNPVAVMVSFINFVEPALRKMQGEQGWQPLKVNAIALEDLRSRQGRTEFSRGVYAFNTQGQLTVRTTGKQGSGILRSMSEANCLIEIAPAIDTVKVGESVTIIPLQGRI

SEQ ID NO: 77294 - protein, 434 aa, Vibrio cholerae
MNKVWLTGLLTATASGVFSASTLAATEITWWHAMGGQLGETVNQLATDFNASQSDYKLTPVYKGSYTETLTAGIAAFRAGQAPNILQVFDAGAATIMSSKGVAKPVQDLMIESGYPFTAQDYIAGVRNFYADNTGKMVGMPFNSSTPVLYYNKDMLASVNAQAPQTYEQLEQVAAKLAEKGQAGFAQSLTPWIMFENFKSRHNLPLSDKQNGYQDLSTKIMFNSDDMLMHVKKLKEWSDKGYYKYYGSDWDANQTPFERGEVAMWMGSSGSFGGLRNRVKFNLGTTYLPYWESVTKNPTHTFIGGAALFALQGHTPAQDKGVAAFFAYLTKPETQMNWHKTTGYVPVTNAAYDLTKQSGYYQENPDAEVGVKQLSLPDGEWTKGYRLGYYPQVREVMHREFDNIFSGRSTVESSLNKVEDESAKLLNRFARTVQ

SEQ ID NO: 77295 - protein, 237 aa, Vibrio cholerae
MMPSIIVGHRGVAGTYPENTRVSVQAAINLGLSWVEVDVQPTKDNVLVVCHDHTIDRCSNGKGRIDEYTLAELKQLDFGAWFDPRFAGETIMTLEELLVLAAEHDLGLNIEVKVDKHDVASVVQQLKAQLDQSPLVADKILLSSFSHDIILQLHQHCPGYKLGILSERLTQRDRQVLKQVNAFSCNLNYRWITEKHIRDLKNGGYQIWCYTLNQVDKFRYLDKVDAIFSDFPERFIN

SEQ ID NO: 77296 - protein, 344 aa, Vibrio cholerae
MRTQFEGLLMATINDVCKLAGVSKATVSRVLNETGQVKAQTREAVLAAMQQLGYQPNSLAQALATNTTNSIGLVLPHFESSYFGSILFEAEQGAQKAGKKLLVMNSKNSEQGEKEAVATLAAQRCDAILLYSRHLNEVQLLELQQQHPSPLVILNRRLHHPQLHSFGLDQTQIAQLAMQHLLNLGHRQIACITSPLVSETGKIRYQVYQQALHEQGIELSSSLVIEGDNTLLGGYQAMQQLLQQGISMTAVFACNDDMALGAMRAMHEHGIHVPKQVSIIGIDNEPAAAFAIPSLSSVSLPIGELTQQAISLAVEIANKKPQDAQHRLYQGSLIARESTIALKL

SEQ ID NO: 77297 - protein, 478 aa, Vibrio cholerae
MAKSIFPNDFLWGGAVAAHQVEGGWDQGGKGVSIVDVLTRGAHEVPRRITDGVMEDEFYPNHQAVDFYHHYKEDIALFAEMGFKCFRTSIAWTRIFPNGDEAEPNEAGLQFYDDLFDELLKHNIEPVITLSHFEMPLHLVKQYGSWLNRDLIDHFTKFAQVVMTRYQHKVKYWITFNEINNQCNWKLPIFGYCNSGMLYAEQDRPEQAMYQVLHHQFIASALVVKLGHEINPDFKIGSMIHMMPLYPATSRPEDVLLAQELMREKYLFSDVQVRGYYPSYLRKEWQRKGIEIEMQAGDEQILRQGCADYLAISYYMTNIVSAAPEQEGETTSLFETSRLNPYLPASDWGWQIDPQGLRYALSELYERYQKPIFVVENGLGALDTVEADGSINDDYRIRYLSEHIAAVKQAIDYDGVEVMGYTPWGCIDCVSFTTGEYKKRYGFIYVDKHDDGSGTMARAKKKSFYWYQQVIASNGEKL

SEQ ID NO: 77298 - protein, 724 aa, Vibrio cholerae
MEHNKAGSSGQCPVMHGGLTSASMSNMDWWPKALNLDILHQHDSKTNPLGADFNYREELKKLDVEALKRDLKALMTNSQEWWPADWGHYGGLMIRMAWHSAGTYRIADGRGGGGTGNQRFAPLNSWPDNANLDKARRLLWPIKQKYGNKISWADLMILAGNMAYESMGLKTFGFAFGREDIWHPEKDIYWGSEKEWLAKSGGENSRYSGQRDLENPLAAVMMGLIYVNPEGVDGNPDPLKTAQDMRVTFARMAMNDEETVALTAGGHTVGKAHGNGKASNLGPDPEGAELHEQGLGWNNHTSRGIGRNTVTSGIEGAWTTHPTRWDNEYFYLLLSYEWQLTKSPAGAWQWEPVNIKEEDKPVDVEDPSIRYNPMMTDADMALKIDPEYRKISERFYKDPAYFSEVFARAWFKLTHRDMGPKARYFGPDVPAEDLIWQDPVPAGRKDYDVNAVKAKIAASGLSISEMVSTAWDSARTFRGSDKRGGANGARIRLAPQKDWEGNEPARLGKVLAVLEKIAAESGISIADTIVLAGNVGIEQAAKAAGVNVTVPFAPGRGDATIEQTDVESFEVLEPLADGFRNWQKKHYVVTPEEMLLDKAQLLRLTAPEMTVLIGGMRVLGTNYGGSQHGVFTDRVGALTNDFFVNLTDMSYTWKPTGRNSYEIVERKSGKVKWTATRVDLVFGSNSILRAYAEVYAQDDNKEKFVKDFVAAWTKVMNADRFDLV

SEQ ID NO: 77299 - protein, 152 aa, Vibrio cholerae
MSNTHQGLKAVAILESAKGIVSLLLGLGLHHVAGDSLQLLLLDLLQHLHLNPASYWPEKLLHQAGLFTHFNLNWVAAGALVYGAIRLIEAYGLWHNLLWTEWFALLSGAIYLPFEVYELFTHPGVFSMAALLINLVIVLYMYRIIRSKVPQR

SEQ ID NO: 77300 - protein, 556 aa, Vibrio cholerae
MPYNSATDLLQREGYGVVHNQFINNMAMYCETRHSILAAIQANRHAPALWVKQKTYTYQEMTDMALSLSDYWHLQGVQRVAILSVRDLAAYSAIWASYLGGMTYIPLNARATTEQIQETLIATQCDSIMVDAQQLSRLSSLLETCIDRLHIYALPDVDVEPLRQQYPQHTFHTVQITEQDVELLVVKYHLDNEHEYAYIMQTSGSTGKPKRIAVSYSNLHCYISQIDKLFPLNAQDRVGQYSDLTFDLSVHDIFYSLISGACLYVVPELAKLSPAEFIHHHQLTVWLSVPTVIELALQRQTLTPHSLPSLRLSFFCGQALLHDLAEQWQQATQQPVINLYGPTECTIAVTYHRFVAHSGMASVPIGRAFEEECLAIINEQGELMRFESAPEGYRGELLLSGKQLVKGYLNDPLNTQSAFFQHEGRLWYRSGDIVTKSNGVLIHLGRRDHQVKIAGQRVELEEIETVVRRVTQAHSVAIVPWPLSESGYASGTVAFVDTHTQWQPDLWLSQCKQQLNPTFVPKRWYAIEQLPRNANGKTDIKALQQQLASQTYETSH

SEQ ID NO: 77301 - protein, 516 aa, Vibrio cholerae
MSELSPQWLLVSLYLGGLVLSLWLPQQQWRIAKFATLAGFIAMLGNTLFAIGQASINLVPVDGLGIVMAILVSLLGWVITRFAHRYLQGEAQQARFVTATLFTLSCVALLVTSQHLLVIVLAWSGTSVGLHRLLTFYPERKAARVVAHKKFLVSRFAEICLLLALGLIYLDVGSLSLQEIHFALNAQDSLPLSLTGAALLLAFAAILKTAQLPLHGWLIQVMEAPTPVSALLHAGVVNMGGFVLLRVAELIGLVPSAQWLLVIVGSLTAVLAGMVMLTRISIKVRLAWSTCAQMGFMLMEIGLGLYELALLHLVAHSLYKAYAFLSSGEAVERARLHDFQAPQSVNGKAVGALLAVGLSAALILILHHLWQSLTSNLHLPNAVVAILALGFAPLLWQSGRFTPSGLSLGVLRVALLTQLYFVWHLLFAGLAPELRPASPLALSFVMFCFITLYLMQVLLCLYPKSRLSLWLYPWVYHGFYLDETFTRLTFKYWPVQLTLPTALSSTQAQPTTGERV

SEQ ID NO: 77302 - protein, 862 aa, Vibrio cholerae
MARAINSAYRSFINSSATDDRRTRMNAPRSLSALSTTANPALSTLVEQVCALIAPNWPLDRMIAVSPYWKRIDKPFAQAAAELKQLAASPMTMTLSDYHLRWQNKQIQSADLQQAIAEQNSDLSESTLIAALQQPTAPSHPWPLLCDTVDSRRDLEHHPAWNDAITHQISQFCAAYFDHHQADWSPDQQTGLFATWREAMIHDRSITLLLNETSVKQKATKLPEDAMAAIEQTLAQLAIAPAQQETYLQAVLMRISGWASWCAYLAWQAGFEGRHDEHLRDLLAIRLCWENLLDDGERGMGSVWLQWQQSWAPRQSCEEDRALRIALLWQRSAEIAYQRQLFAALTSAQESAPQSSYPEVQAAFCIDVRSEVIRRHLEAQSPHIQTLGFAGFFGLPIRYQLLGTEASRPQLPGLLAPSLIVSDSTGNEDQDAKLALRRRARLKRHFSWRAFHHLPASTFTLVETTGLAYLTKLLKRTLSYPALSASVERFAFTEHEWQSVKPQFTRDPQTLAQRAQMAANILRALGIATEQARLVLLVGHGSQTQNNPQRAGLDCGACCGQSGEVNARTLAALLNDQAVRQALPEYGISLRDDVHFIAALHNTTTEAMRLFDRHEIPTSHREALEQLDQQLTAASHGARQERAPSLELNHNHQAPPSKDNALSAQQLEQAFLRRAHDWAQTRPEWGLTNNAAFIIAPRQRSKQAKLDGRVFLHEYQPERDPEGQLLTQIMTAPMLVTHWINMQYFASTVDNRRFGSGNKTLHNVVGGNIGLFEGNGGDLRCGLALQSLHDGQGWRHEALRLTVVIDAPRERIEQVMASHRVVEHLVKHEWLYLARFADQGIEIYLQGTWQRITQPSSDSSAR

SEQ ID NO: 77303 - protein, 567 aa, Vibrio cholerae
  MISC_FEATURE (520)..(520): X=any amino acid
  MISC_FEATURE (522)..(522): X=any amino acid
MISKNMRSHLKLSFKSIFSIKFIVISHLVKRVIYPYILAGQKRAFDFFILRNVGQNGRSHWRATMHMSKSFLIISMGFVAVSVQAQTLTRDNGAPVGDNQNSITAGEHGSVLLQDVHLIQKLQRFARERIPERVVHARGTGAHGEFVASGDFSDLTLSAPFTSKGKITPVFVRFSTVIHSKGSPETLRDPRGFATKFYTEQGNWDLVGNNLPVFFIRDSIKFPDMVHSLKPSPVTNLQDPNRFFDFFSHEPGSTHMLTWVYTNLGTPASYRTMDGFGVHAYKWINQKGDVNYVKFHWKSLQGIESLRPDEVVKVQGQDFNHLTNDLYTQINAGNHPKWDLYVQVLTPEQLSKLDYNGLDATKVWLDVPEKKVGTMTLNKVPDNFFLETEQSAFAPSNLIPGIEPSEDRLLQGRLFAYADTQLYRLGANLFQLPINRPLVEVNSHNQEGASNSAQTASDINYQPSRKLELKEDPQFKAVQTQLVGSVQQKAISNPRNFYQAGVLYRSLNEQDKQDLITNLXGXLNKVTDKEIKATMVSHFYRADKDYGTRLARATNTDLKQVAKLAAM

SEQ ID NO: 77304 - protein, 261 aa, Vibrio cholerae
MNPLLSAHCSCSQEIAQQFAHYQHISGEGEIYQTSLMSALIAGVYEGATTIAQLLEHGDFGLGTFNELDGELIAFDRQVFQLRADGSAQPAHPEQQTPFAVFTFFKADIELPITERMTREQVHQLIDRLVPSDNLFCAIRIDGTFPSVQTRTVPKQQRPYRPMLEVVKQQPVFRFQQQHGVIAGFRSPQYTTGINVPGYHEHFITQQRTGGGHIQDYIIRSGFLQIGRVSRLVVDTPVSRDFLEANLTPNNIRTAIEAAEK

SEQ ID NO: 77305 - protein, 567 aa, Vibrio cholerae
MQSNIHLRSGAQLIAQQLEAIGVRYVFGIPGAKIDRLFDAIEDTKIQMIPVRHEANGAFMAGIMGRLSGRAGVTLATSGPGCGNLVTGVATANSEGDPMIAIGGAVKRDYQQKQTHQSMDTVSIFRSITKYSAEIQHVDATSEIMANAFRLAESGRQGACFISVPQDVLADKTSSEIIIPSAYQPTAEADPDSLQEAVERIQKAQRCVVLLGLHASHQATAEAVSAFLHKTQLPVVGTYQAAGAVDINYYHHFAGRVGLFNNQPGDVLLKEADLIITIGFNPIEYDPELWNSQRCPIVHIDIEPAQYQIHYQPCLQIVGNIASNLAALCRPLPGFTRLSPTALAILEEVTQQRHAIKAYPLRYQNAGFHPLTLIKTMQAIIKPDTTLCLDMGSFHIWIARYLSCFRARQMLVSNGQQTMGVALPWAIAASLLKPGHKVVSVSGDGGFMQSSMELETAVRLKCNIVHIIWVDNAYNMVEMQEVQKYHRAAGVKFGPIDFKAYAESFGARGYAITQPDQLLPTLRQAMEVEGPAVVAIPVDYSDNPKLMQARTEANQDPVFQTLEGVFA

SEQ ID NO: 77306 - protein, 252 aa, Vibrio cholerae
MRGLTHKVALVTGAANGIGLAIAERLYQEGATLALADWNEEQLAIVIEQFDSARVYAQKVDVSDPEQVQALVRKTVERFGRLDILVNNAGIHIPGTVLECSVQDWRRIASVNIDGVVYCAMHALPELIKTRGCMVNTASVSGLGGDWGAAFYCATKGAVVNFTRALALDHGAQGVRINAVCPSLVKTNMTNGWPQAIRDQFNERIALGRAAEPKEIAAVVAFLASDDASFVHGVNLPVDGGATASDGQPKIV

SEQ ID NO: 77307 - protein, 477 aa, Vibrio cholerae
MSQPVDRKTFLGIFFTVFLPMFLAAVDQTLLATATPAIVRDLGNLQLSSWIAIGYMLASAASVPVYGWLGDQYGRKPMLMIALSIFALGSVICAFAMNMPWLVAGRIVQGLGSGGLMSLSQALIGELVPPRERARFQGYFSSLFAVASIGGPVLGGVLVTYLSWQWLFWFNLPLVGIALYRLARFQFVQSSRKSEASIDVAGLILFPSMMTLIIYWLSAGGHYFPWFSVTSISLVSAFVLTSLLFIAQQKRVTASFLPLRLLARREIHIPLLSTFIFAACLFALIFFLPIFLQLGLRVNAAQSGLLLIPLSCGIIGGAYTTGKVIAKTGVPKFLPVFGMSLSSCAFAVLAMFSLSAPVVSAIAALCGLGLGTVMPSTQVLVQTLAGKANLGRITAMASLSRSLGASVGTAFFGTLIYSLLPGLSPNSGLQAIAALPQSEILHAFQIGFAVAALLALLGALNALRAPKIQLDDYAFDS

SEQ ID NO: 77308 - protein, 274 aa, Vibrio cholerae
MTVRSQLTHDSKTSLDHQGTVMLSNGYLKRYVRCCLLIIGLCPALLYAQSSPNAEDKLVRIASGEWPPFIGSDLPNYGFVGEIITQAFTKQGYQVEFQFLPWARAYAETQRGLYDATAIWMHSAEREIDFFYSLPVSQEEFVFFYPVKKPFDWKTLSDLAPYKLGGVLAYSYGKELDALLDSGVLTMERDGLAAKNLEKLAKGRVDLVPEEKHIGYYLINQQIPHLQDLITHHPTPFLTNSNYLLFPKQSARSQELLGVFNHYLVQTQKKKKKQ

SEQ ID NO: 77309 - protein, 408 aa, Vibrio cholerae
MGLSSAAWFGATSDPQAFSAGNGSSRMTLFELFKAELKALFTNPVVVLTVFGGVVFYSFLYPLPYAKQIPREQTVSVVNLDQSQASFQLERMVDATPQVKIVQRDHTIADAKQAFLDKKVAGILVIPEHFYKDLLLGKSPTLAYAGDASYFLVYGTIVEGLAQAGGTLAAQTKVSRLVIEGEPMAFAAQHFSPTSANLKPTFNPRMGYVDYVVPAVFVLILQQTLIMAAGLMVGTQKQGHGYWSRVAPAKLLLVRSFVLVAVYYLLSLYYFGASFDLHGVNTLAKPNDLISLLLPFLLACNFVGIALGAVTPRRELVTLVVLISSMPLIFTAGFIWPLEMIPAPLVWLAQCFPSTPAIQGFLGLNQMAASWSTIAPKWTLLWAQALVWGGLAFYLLRRVRQRTAKPPQ

SEQ ID NO: 77310 - protein, 237 aa, Vibrio cholerae
MKNVFGLGLIIALAGCVTVTETAGNATQSDPTEMAEARIALGLGYLENGSMIKARENLEKALQHAPDYYRSQLSMAHYYEAVGENDSARKMYRTALSEHPKNGNVLNNFGTFLCKQGEYDTADQYFRRAVEQPYYYLISASYENAGLCALKAGKTDNAREYFKRAIDHDPNRLLSILQLTKMEIEAGDYTPARLRLMDLNQRYGYQKASLKLLIELEKRAGNSALEQKYQTLLNSLS

SEQ ID NO: 77311 - protein, 405 aa, Vibrio cholerae
MIELHSPQYLKVTFALAFGSFLVFCNLYLFQPMLPYLANHFAVSETQINWLFAASTLALSLCLVPWAVTSEAVGRRLVMLTGLFAMPVIGLAMLYAEQFWFLVLTRALMGVALAAFASVAVAYMVEELSPQAFGKAIGGYIAANSLGGITGRIAGGLLTDALGWQHAVVAMAIFTLLGALLVAYLLPIQQHFKPQRGLFFHHNRALVKHLQNRTLWLAMLIGGVNFALFVNLYSVMGFRLVAEPYSLPIGIASLIFVCYLAGTLSSKLTANWNRRFSAIPGMMLGALISMAGMLIALIEAIPAMLVGLILISFGAFFTHTLAYAWVSQKATQAKATATALYLVHYYIGGSLGGFYLLYCWQHGGWEMVTLGGLGLYFILFILGWRLSRQNKQTPQGSQALASPSA

SEQ ID NO: 77312 - protein, 401 aa, Vibrio cholerae
MSASTVNTQQTPQMSLLLYIVLGALGALTPLAIDMYLPAMPTIARDFGVNAGAVQITLTAYTAGFAIGQLLHGPLADSFGRRPVMLCGIFLFGIAAMVSATTNGIEALTYIRAAQGFAGAAAAVVIQAVVRDMFDREDFARAMSFVTLVVTLAPLVAPMIGGHLAIWFGWRSIFWVLALFAALVIAMVMWKIPETLSPENRQPLRFRSTMRNYFDLCKNPVAMGLIFSGAFSFAGMFAFLTAGAFVYIDIYGVSPDGFGYLFGLNIVAMIALTTINGRFVKKIGSHNMLRFALFLQLMAGIGLFVSWVLDWGLWGTVPFVVLFVGTISTIGSNSMGLLLSKYPRMAGTASSLAGTLRFGTGSIIGAVVAALPGTETWPMIFVMAACSVLSGAFYWTLGRKA

SEQ ID NO: 77313 - protein, 231 aa, Vibrio cholerae
MRLDKFLCDALGTTRKEATQLLKSGEVTVDDVVQKSGAFKLKETSCVEWQGREITLHGPRYIMMHKPDGVVCSHEDGFNQTALTLLDEVNIQDLHFAGRLDVDTTGLLLITDDGQWSHRVTSPKHKCEKTYRVWLADPIQADYAEQFNRGIELRGERELTLPAQLEVISETEVLLTIHEGKYHQVKRMFAALGNKVIGLHRERIGQITLDETLEPGEYRYLTEEEVASIWK

SEQ ID NO: 77314 - protein, 462 aa, Vibrio cholerae
MGISCMPIKSRALRHLSLKTRLLLAAALWLGAMILAAGYLIPNLIHQYLLEDVQNQLQLSMDEITANLEANPQGQLTLTTRLADPRFTQPYSGLYWSATLGDQTLRSRSLWDRFLTEETHVHGTIYLGAKEESLIVLKRTVYLPEFSQPITITIGLDDAPLKATLQRVSKELWMILALLFSGILVLTGVQVTWSLRPLSKMQRELSALRDGQQNALNGDYPQEISPLVNDLNALLFHYQELLERARHHAGNLSHALKTPLSVLKNEVTQLNDAQLRIQLQPSVEQIQQQIDYHLGRARMAGSANILSVKTAPSARVDAISQAFDKVYAERGITLVNELDSDLEVAVEPTDLDEMIGNLLENSYKWANSLIRVHSQILSDDWVQICVEDDGAGISATNREKALKRGVRLDETTPGTGLGLNIVSEMAHSYRGALALGESQLGGLKATLTLKQPTRAAKAVKSH

SEQ ID NO: 77315 - protein, 92 aa, Vibrio cholerae
MKFEAVLRTDLGKGASRRLRNTGYFPAIVYGGEAAPVSISLNHDDVMNQMDKPEFYEAIVLVIDGQEVKVKPQDVQRHAYKPKVEHMDFIRI

SEQ ID NO: 77316 - protein, 257 aa, Vibrio cholerae
MHIIPVASDPKTCSCGVNENSLDFDFTMAFQPIVNCRTKEIFGYEALVRGLNNESAYSVISRVNEDNRYLFDQMCRVKAIALAAKLGLTSKLSINFLPNAIYVPERCIRTTLEAAKRYQFPIENIMFEFTEAERVEDVNHIKRIVEYYKSLGFQTAIDDFGSGYSGLNLLADFQTNIVKVDMGLIRNIHADQVRQSIMKNCLKLFSDLNIQPLAEGVESHAEFAWLKAAGVELMQGYYFAKPGFESLPSVNPEFSEA

SEQ ID NO: 77317 - protein, 1146 aa, Vibrio cholerae
MPYWGGTGQEPIGIEHDFASGIAKELGINIEYKGFDTIEALLNAVSTGKADMAIGFGQTLAREGKFLFSKPLYENVRVIWLRDKAMEEKPFASLKWVCIQGTSYCEILKDRGYPNIIMARNYSSSVEMIRQGIADATVTNYVSLNHYLSQKRLALGKVIFDPDLGVQTNRILINNNEPLLLSAINKVIDADKQGLTENKLNSADVYFLNDQANLNILRNENVNPVVRYTIQDDLFPMSYWDEKEKKYKGYVHDLLERISTKSILKFEFVPAYGRDVEDMLRHGKVDLIPSFNMTYVDDRYFIHTGRYTDIQFGYIETTRPYTTPITGILDRTGKFNAYIAVQKNLSDVKVYRSMYDLEQALEKGDITHGLLNKVLINQMLLDGHQDAFKLSPLTEGQDLRADMTMLVRKDARGLQNMLQKVLATFSQQEIDEIKGAYDRVTVYFGYDKQKVLIYALIILCALLSIGLILTLSLSRLRGKLRSSEQVAKLSTEQLRWLTELLDAIPSMIFISDAKGEVVLTNAAYRKIYHTCCEKGCVQPQPECSFLALPDQHEAEFSIIIQAPKSNCSIGEHYFHVTRRAISHPINQRKYYLTLFNDITELKETEQALRQSNEQALQAVEARNHFLAVVSHELRTPIAAMLGLMEILASRLKSSESQLLLTNAISSAERLKLHVNDILDFSKIEAQQLQLDIGLYNLADELGPLLRGFEASAQLKEIEFDVIWSPNSLLLANFDALRFNQIVTNLLSNAIKFTDQGRVVFKIDVAPEMLTIVVEDTGCGMTQTQIESLFVPFAQADSTITRRFGGTGLGMSIVANLIELMNGKIEVKSEFEQGTQIQVNLPLVTQTCDEFRGQVVAMSYRSPYMLWAKALGMRVEENEEWVEQSGHNIYPDLLLNRLREVSNLTQAQTEPAHSRLLQGHVLVADDDAINRLLIKKQLSELGLSATLVSDGLQAFEKLSQHPEQYDLLITDCHMPHLDGFALTRKVKQEISLFKGAVVGCTAEDSRLAAEQALQAGMDKVIYKPYTLANLRKVLSRYLTTQWVALPEQSWLDAYQEEEREEMAMVVAESLAQDIALLNQPDCDVKALAHRIKGAAGSLQLQRLADLAKTVEKQNDPQQLVADKQQLINAMHEVVEQAQQWLHQYQSE

SEQ ID NO: 77318 - protein, 417 aa, Vibrio cholerae
MKDSQEVTHFSAARSSKWTQHDTYWLLSLFGTAVGAGILFLPINIGLGGFWPLVLMAVLAFPMTYLSHRGLARFVLSSRRPNADFTDVVEEHFGQNAGRLISLLYFLSIFPILLIYGVGLTNTVDSFLVNQADMVSPPRALLSGALVFGLIAIMLSGEKIMLRAFAIMVYPLAAILALLSLYLIPYWSMPSFDFPQTSDFLHTVWLAVPVVVFSFSHAAAISSFANIQRRHYGEQADQKSEQILRHTSVVLILFVLLFVFSCVLALSPQALQEAKAQNISVLTYLANVTDNPFIATLGPLVAFIAITSSFLGHFLGARESLSGLLTKNLGVSLRLAERLTIGFLFVTIWIAAILNPSILGMMEALSGPVIAMILFIMPMIAVFKVPALREHQKRFSTFFVLLVGLLAVSALLYSLLR

SEQ ID NO: 77319 - protein, 262 aa, Vibrio cholerae
MSALLEVTNLHKDFVTRSGFLRKQIQHAVKPVSFTLEAGQTIGFIGQNGSGKSTLARMLAGMVAPTGGEIRVNGELLEHKDYSTRCKLIRMIFQDPNTSLNPRLQIGTILEGPLKRNTSMTPEARMRRVKDTLQRVGLLPEHAYFYPQMLATGQKQRVCLARALILQPSIIIADEALNGLDMAMRSQILNLFLELQEEMGVSFVYVSQHIGVIKHITDKIIVMHEGDVVESGETHEVLADPQHPITQRMIESHFTKAPTFKY

SEQ ID NO: 77320 - protein, 301 aa, Vibrio cholerae
MILVVGHKNPDSDSICSALVAAELLKARGLEAKAVRQGEINRETQHILNVAGVEQPELRTSVAGEQVWLVDYTDLAQAPDDLNQAEILGIVDHHRLGDVMTVNPLEAWIWPVGCTSTILFNLFKMENAEITRPLALLMISAILSDTVGFASPTCTQKDRDAVAELAVLAGITDLEGFIKALLIAKTDIEGLSAAQLVEKDLKAYPFNGRELVVGQVELATLEQVADMIDALEADLQRRCDEESLALAALMLTDITTAQTRLLFKGEWSEKLAKHAKDGVLMMENTLSRKKQGWPWLQTELA

SEQ ID NO: 77321 - protein, 276 aa, Vibrio cholerae
MKRVVVIGAGWLGLPLAQWLKQQGHIVYATRTTPQAVQTLEDQGIESFVCQLDQPDGLSDALLERQCDTVIGCFPPGFRQGAGEHYAKHWQNLVQHAKQANIQKLVMISSTSVYPDIAKAMNEQDASLALALDNSAFDAKARILLKAEQYVITSGMDYTILRCSGLMGPKRHPSRFVSKMAQVSRLAPANMLHLYDAIGIAHFSLEQLPYSIINATTPNTVSKAEFYQAALDAVASDLPLPPLCDKEEKRIVCDKLLAAGYRFHFSHTLEAVHGYE

SEQ ID NO: 77322 - protein, 181 aa, Vibrio cholerae
MKQLLDFIPLIIFFALYKFYDIYVATGALIAATTVQVIVTYAMYKKVEKMQLITFVMVALFGGMTLALHDDNFIKWKVTIVYVVFALGLTISQIMGKPAIKGMLGKELTLPDAVWSTINWAWVMFFSGCAALNLYVAYHLPLDVWVNFKVFGLLAATLVFTLLTGGYIYKHLPHEPKQKNQ

SEQ ID NO: 77323 - protein, 146 aa, Vibrio cholerae
MFAVDPQMNQTVNSPKGQLLLRTLAMPADTNANGDIFGGWIMSQLDLAGGILAKEISCGRIVTVSVSSITFKKPVKVGDVVCCYGECTKIGRTSMSINLEVWVKPVKEEGVGERFQVCEATFNYVAIDANGRPRAISLSNGSQKSS

SEQ ID NO: 77324 - protein, 789 aa, Vibrio cholerae
MHSEVTPIHHYKKYWAECFGTAPFLPTSREEMDQLGWDSCDVIIVTGDAYVDHPSFGMAIIGRLLEAQGFRVGIIAQPEWQTKDAFMTLGKPNLFFGVTAGNMDSMINRYTADKKIRHDDAYTPNNKGGMRPDRCSLVYSQRCREAYKDVPIVLGGIEASLRRVAHYDYWSDKVRRSILLDAKADILLFGNAERALVEVAHRLANGESINKMVDIRGTAVNLAQVPEHFKIIDSTRIDQPNKPFVPSNPYEVETQCATKGDEKEEAQPITIRPSRHDAKTTAVRLPSFEKLVNDRILYAHASRVLHLETNPYSGRALVQRHGDRELWVNQAPIPLTTEEMDFVFGLYYARVPHPKYGDAKIPAYDMIKTSVNIMRGCFGGCSFCSITEHEGRIIQNRSQESIINELKEIRDKVPGFTGVISDLGGPTANMYRLGCSDPKAEANCRRPSCVFPGICHKLNTDHKHTIDLYRAARDVDGIKKVVIASGVRYDLAIESPEYVRELVTHHVGGYLKIAPEHTEKGPLSMMMKPGMGTYDRFKELFEKYSAEAGKKQYLIPYFIAAHPGTEDEDMVNLALWLKSNNYRCDQVQNFYPSPMCNATAMYHAEVNPLKRVKYKKPEKVPVAKGEAQRRLHKALLRYHDPANWPMIREALIAMGKRHLIGDRPECLIPEKDSDLVTPAQSRKSGRHGANRFATKHTHSQPGFDALRGNKSGGQGRPNSGNKSNQGKPAGSKPTGSKPTANKPAGNQSARSEQNRGQQGQRGSATGGKPQGSGRPASRGNTQRQPQRAR

SEQ ID NO: 77325 - protein, 336 aa, Vibrio cholerae
MATIKDVARLAGVSTTTVSHVINKTRFVAETTQEKVMEAVKQLNYAPSAVARSLKCNTTRTIGMLVTQSTNLFFSEVIDGVESYCYRQGYTLILCNTGGIYEKQRDYIRMLAEKRVDGILVMCSDLTQELQDMLDAHKDIPKVVMDWGPETSHADKIIDNSEEGGYLATKYLTDRGHTEIACLSGHFVKAACQERIQGFRRAMAEAKLTVNEDWILEGNFECDTAVLAADKIIAMDKRPTAVFCFNDTMALGLMSRLQQKGIRIPEDMSVIGYDNIELAEYFSPPLTTVHQPKRRVGKNAFEILLERIKDKEHERRIFEMHPEIVERDTVKDLTKS

SEQ ID NO: 77326 - protein, 876 aa, Vibrio cholerae
MGKSLVIVESPAKAKTINKYLGKDFIVKSSVGHVRDLPTAGQTATPTGKAAAASTKKASTTDKEQQKREKERAALIKKMGVDPYHGWQANYQILPGKEKVVAELQKLAKDADSVYLATDLDREGEAIAWHLREIIGGDEKRYKRVVFNEITKNAIQQAFKQPGELNMDGVNAQQARRFMDRVVGFMVSPLLWKKVARGLSAGRVQSVAVKLLVEREREIKAFVPEEFWDINADTLTADKQDFRLLVAQKDGLAFKPVNETEALAAVAALNKAQYEVCKREDKPTTSKPSAPFITSTLQQAASTRLGYGVKKTMMLAQRLYEAGYITYMRTDSTNLSAEAVENLRGYITKHYGEAYLPSQPNVYGSKQNAQEAHEAIRPSDVTVTADDLEGMEADAHKLYALIWNQFVACQMTPAQYDSTTVSVKAAEYTLKAKGRILKFDGWTRVQRPLGKNEDQILPPVKVGDSLKLVSLDPKQHFTKPPARYTEAALVKELEKRGIGRPSTYASIISTIQDRGYVKVDQRRFFAEKMGEIVTDRLDENFDDLMNYDFTARMEEKLDQIAEGEVNWTAVLDEFFADFSRDLETAEQDESLGGMKPNHIVMTNILCPTCSRPMGIRTASTGVFLGCSGYGLPPKERCKTTINLGDEEGVINVLEEDVETAALRAKKRCPICETAMDAYLIDDKRKLHVCGNNPNCEGFIVEEGEFKVKGYEGPTVECDKCGSDMVLKNGRFGKYMGCTNDACKNTRKILKNGEVAPPKEEPVHFPELPCENSDAYFVLRDGASGLFFAASNFPKSRETRAPLVEELKRFAERLPEKYQYLTSAPAHDPDGLPAVVRFSRKEKEHYVRTETEGKPSGWMAVYQEGKWLVTDKRKNAK

SEQ ID NO: 77327 - protein, 72 aa, Vibrio cholerae
MAKEDVIEMQGTVLDTLPNTMFRVELENGHVVTAHISGKMRKNYIRILTGDKVTVEMTPYDLSKGRIVFRAR

SEQ ID NO: 77328 - protein, 224 aa, Vibrio cholerae
MWREYISNSCLIRVIEMALRSSTKEKILDVAEGLFAEYGFNDTSLRTITSKAGVNLASVNYHFGDKKTLVRAVLNRYLEAFMPEMKQSLERLNERDDYDMAEVFEALRAPLRSLSELRPNGTSRFMLLIGRGYTDVQGHLRWFITNRYNDVLTLFTDSVLKANPNLTRETLFWRLHFTLGTCVFTMASSQALAEIAENDFGSKVDPKSVVDQLIPYLAAGVAAK

SEQ ID NO: 77329 - protein, 488 aa, Vibrio cholerae
MRSLAMLPTDFPFFHQSAFINGQWILGEPQARQTVTNPFDGSLIGSVPLLSAAQVQEAIAGAQAAQILWCQQPAENKAKILRRWYELIEQHHESLAKLLTIEQGKPLAEARGEIHYAASFVEWYAEEAKRAYGELIPSHKPDARIMVSRQPVGVVAAITPWNFPAAMITRKCAPAFAAGCAVVLKPAPDTPFTALALADLAQQAGIPDGLLQVVTGDAIEIGRVLTESKTVRKLSFTGSTGVGKLLMAQSANNVKKLSLELGGNAPFIVFEDADINAAIDGVMVAKFRNAGQTCVCANRIYVHDAVYDQFAAKLVDRVSRLNVGYGLDAGVNIGPLINDAAVAKVTSHIVDAQSKGAKVMFGALPEAGSRLFQPHVLTEVTDEMRVADEETFGPLAALFRFSSEQEVIERANATDSGLAAYCYTQSLRRAWHMSEALEAGIVGINEGLISTTLAPFGGIKESGLGREGAKHGLEEYLEVKYTLMGGLA

SEQ ID NO: 77330 - protein, 292 aa, Vibrio cholerae
MVFSIVRHWSNSLVNWLASNAVQHLFQLFIFLLILLAAKGGAKVTRTVVRSAVNSKNIRISHLMQDFFVSMSGKVVWVIGILVGLSQIGLNLAPVLTGFGIAGVIIGFALQDTLSNFAAGMMLLIYRPFDVGDFVHAGGVDGKVSHMSLVNTTIRTFDNQIIIVPNSKIWGDVIKNVTHERIRRVDMVFGIGYSDDLLKAEAVLTDIVKSHPAVLKTPEPNIKVHTLNTSSIDFIVRPWVKTDDYWDVYWDVTKEVKLRFDREGISIPFPQQDVHLHLVDQKAFIPPTQPTS

SEQ ID NO: 77331 - protein, 1022 aa, Vibrio cholerae
MVFMVSKTNEQALEAAIEKGLAGICKEELALGEAPLNYNNDLYLIGSPSDFDKQYALDTRLFWQFLEDTQASELEKLKRTSPHDWQRKILERFDRMIKRHGVLRLLKKGLDVDDAFLSLMYPAPLASSSEKVKKDFSANLFSVTRQVCYSNANPLEEIDMVLFINGIPLITLELKNPWTGQNAVYHGQKQYRDDRDANQPLLNFARCLVHMAVDTDEVYMTTKLAGKNTFFLPFNKGFNFGKGNPINPHGHKTAYLWQEVFRKESIANIIQHFIRLDGSSKKQLDKRTLFFPRYHQMDVVRRLVDHCSVNGVGQTYLIQHSAGSGKSNSITWAAYQLIETYPISDDLPGSRGKEMPLFDSVIVVTDRRLLDKQLRDNIKEFSEVKNIVAPAFKSSELKSALENGKKIIITTIQKFPYIVDGIADLSDRRFAVIIDEAHSSQDGHNQDKLNEAMGFVSEDVLDKALQSAKNRKMRSNASYFAFTATPKNTTLEKFGQRQADGTYVPFHLYSMKQAIEEGFILDVIANYTTYKSYYEIEKSIQDNPEFDSKKAQKRLRAYVEASQETIDTKAEIMLEHFIKHVVNGKKLKGKGKGMVVTQNIESAIRYYRALTRQLNKMGNPFKVAIAFSGSKEVDGIEYTEADINGFPEGDTKDYFDVNYKRKEPDSPIPKHVDQDAYRLLVVANKYLTGFDQPKLCAMYVDKKLASVLCVQALSRLNRSAPKYGKKTEDLFVLDFFNSVDDIKTAFDPFYTSTTLSEATDVNVLHELKDDMDDTDVYEWFEVEEFNKRFFEGREAQDLSPIIDIAAARFNHELELENEFKVDFKVKAKQFVKIYGQIASIMPYEVVQWEKLFWFLKFLIPKLSVEDPDKEALDSLLDSVDLSSYGLQRVKLNHSIELDDSETELDPQNPNPRGAYGPEAEKDPLDEIIKIFNERWFQGWSATPEEQRVKFVNIAESIRNHPDFEAKYQNNADPHTRELAFEKMLKEIMLQRRKDELELYKLFAQDPAFKASWTQSMQRMVGM

SEQ ID NO: 77332 - protein, 793 aa, Vibrio cholerae
MDHSVHNKLVSFIWSIADDCLRDVYVRGKYRDVILPMVVLRRLDTLLEPSKEAVLEEVRFQKEEMNEIELDDAPLCATSGYVFYNTSKWTLQTLFSTATNNQQILLANFEDYLNGFSENVKEIVECFNLKAQIRHMAGKDVLLDVVEKFVSPYINLTPAVKEDPEGNKLPALSNLGMGYVFEELIRKFNEENNEEAGEHFTPREVIELMTHLVFDPIKDNLPLSITVYDPACGSGGMLTETQNFVEEKYPASNRDIYLYGKEINDETYAICKSDMMIKGNNPENIRVGSTLSTDEFSSNRFDFMLSNPPYGKSWASEQKHIKEGKEVVDGRFKVKLKDYWGVESEQEAIPRSSDGQLLFLMEMVTKMKSPQDSPLGSRIASVHNGSSLFTGDAGSGESNIRRFIIENDMLDAIVQLPNNLFYNTGITTYIWLLNNNKPENRQGKVQLIDASLLFRKLRKNLGNKNCEFSPEHIAEIVSTYLENQSVERAIDEKGDPVGIAAQVFKNQDFGYYKVNIERPDRRNAQFRADLIEPLRFENSQREVMEYLYAEYGEQVYDAGFVKGIEKEITKWCEENDISLNKAAKTKLLDTKNWIKQRTLVNVASQLHKKIGDEVYNDFNQFKQLVDAELTSLGLKLSAPEKKAILDAVSWYDENAEKVIKKVAKLKQDKLDELLENYECELQDLPDFGYYPTGNHNEFVTYESSSDLRDSESVPLEQSIYQYFLDEVKPHVDEAWINLESVKIGYEISFNKYFYRHKPLRSMDEVAGDIIALEQKAEGLIADILGISVAKVQG

SEQ ID NO: 77333 - protein, 158 aa, Vibrio cholerae
MTHFPRHRYLLSQRAYEHRVLEEAAEILEQRYVRGETFARTENTTEYLRCKLAGYEHEIFAVLFLDNQHRLIEFKELFRGTVDAASVYPREVLKEALNVNAAAVIFAHNHPSGDPEPSQADRRITQRLKDALSLVDIRVLDHVVVGKSSVSFAERGWL

SEQ ID NO: 77334 - protein, 328 aa, Vibrio cholerae
MKTTDLFSTLENNILRNSLDSTTKDKLLSNLSLLRKASLNILITGSTGSGKSSTINALFDMTVAQVGIDSDPHTESVQCYHLNNLVLWDTPGLGDGIDEDKKHVQAIKQLLNKRDDHGQLAIDLVLVILDGGSRDLGTPLRLINDIVIPQLGDDAEKRLIVAVNQADVALKGPESWNYSDNLPTDKAKAFLEKQQNSIARRIHKATQINVKTLYFVAGYSDGVNRQRPYNLSKLLYTIVEILPNNKRVMLANRTISNDADNWKDNDASDYNKKTTLSLWEAIVETTLQGASIGSDIGSIFGKPGEILGKVVGSVAGLFFGGLRYTFGF

SEQ ID NO: 77335 - protein, 506 aa, Vibrio cholerae
MIYAQPGSDNAVITFKSHYDNFIGGQWVKPVSGEYFGNISPVNGQVYCQVARSTQADIDLALDAAHQVREAWAKTSVTERSNLLLKIADRIEANIEQLAVAECWENGKPVRETLAADLPLVVDHFRYFAGCIRAQEGSAAELDSHTASYHFPEPIGVVGQIIPWNFPMLMAAWKLAPALAAGCCVVLKPAEQTPTSILVLIEKIADLIPAGVLNVVNGFGSEAGQALATSQRIAKLAFTGSTQVGQHILKCAAQSLIPSTVELGGKSPNIYFPDIFDHEDTYLEKCIEGTLLGFFNQGEVCTCPSRVLVHESIYDRFVAKVAERAKGIKQGNPLDTATQVGAQASQEQFDKILSYLDIGRQEGAKVLFGGGVAKQEGELGQGYYIQPTLLQGHNKMRVFQEEIFGPVIAITSFKDEAEALALANDTEYGLGAGIWTRDQNLAYRMGRNIQAGRIWINCYHAYPAHAAFGGYKKSGIGRETHKMMLNHYQNTKNLLISYDVNPLGFF

SEQ ID NO: 77336 - protein, 146 aa, Vibrio cholerae
MITELTNIHLIKGNLQANSKNEVFAELAQMLLENNRISNKEDFLNDIEIRERLSVTSMDGIAYPHSKSKAVTKPAIAVGVKHEGIEYGDEEGIKPTVFFMIASPDNGADHHIYVLQELFGKFSEEFIEDIHNAKNEHQILNISIQS

SEQ ID NO: 77337 - protein, 467 aa, Vibrio cholerae
MSTLTAQATNNSSNFKKLLSTMKGHLLFGTSHMLPFIVAGGVLLALAVMASGKGAVPADGLLADISNIGIKGLVLFPIILGGFIGYSIADKPALAPAMISSGIMADMGGGFLGCIVAGFIAGGVVFQLKKIPLSANMTALGAYFIYPLIGTLISAGIVLWGIGEPIKLFMASMNEFLASMAGASKVVLGAILGGMTAFDMGGPINKVATLFAQTQVDTQPWLMGGVGIAICTPPLGMALATFLFKKKFTKQEQEAGKAAAIMGSIGISEGAIPFAANDPMRVLPSIVAGGIVGCVFGFLTNVLLHAPWGGLITAPVSSNIPMYVVGIALGSLTTALIVGFWKPVAEEEVEDEIAEAAPTQAQAAPAAGEGEYDIVAVTCCPSGVAHTFMAAKALEKAGAAAGSKIKVETQGQNGIKNRITDLDVANAKLVILAHDIQVKDAHRFANAKVIECSTKEAMKKAAELIQA

SEQ ID NO: 77338 - protein, 621 aa, Vibrio cholerae
MDITHLIEPEIICLDLKANNKEDVLIELVELLDNAGKLTDKQQFLNDIWRREEIGNTGFEEGIAIPHAKSAAVALPAVVVGISRQGIDYGAEDGQLSDVFFMLASPDGEDHHHIEVLAQISSKLIEEGFVEQLKAAESVEQALALFIHPQHSTLSSTQVMDYADYQPLSPMAQRLARVKEHLLFGTSHMMPFIVAGGVLLSLSVMMSGHGAVPEEGVLADIAQMGIAGLTLFTVVLGGYIAYSMADKPGLAPGMIGTWIAINQYQTGFIGAIIVGFFAGFVVRQLKRIALPDSMSSLGSIFIYPLVGTFVTCGAVMWLIGAPIASSMLWLNQFLASMADSGKVVLGAVLGAMTAFDMGGPINKVATLFAQTQVNTQPWLMGGVGIAICTPPLGMALATLLSPSKFKRDEREAGKAAGIMGMIGISEGAIPFAAADPARVLPAIIAGGIVGNVIGFLFQVLNHAPWGGWIVLPVVDGKLGYILGTIAGALATALIAIALKKTVHEQDNEQGQSLAFSSVIGEGQADILAVTSCPSGVAHTFLAAKSLEKAACLAGVKIKVETQGANGIINRITAKDVQRAKLVIFAHDVAIKEPERFKHIKVIDVTTKDAILNAAALVQIKR

SEQ ID NO: 77339 - protein, 633 aa, Vibrio cholerae
MINQLINADLIQLDLQANSKQAVFEELINILHAQGRISDKAAFLKDIQAREELGNTGFEDGVAIPHAKSAAVTQPAVAIGVSREGIDYGAEDGLPSKLFFMIASPDGGDNHHIEVLAELSSKLIEEGFIEAFLNTKNSEQALELLLKKSAPTPLANQAESKGLIIGVTGCPAGIAHTYLAAEALEKGAAALGFEIKVETNGSIGVKNSPSAEEIERAEAIVVACDKQVDMARFAGKRLIKTNVKAPIRDAQKLINEALRAPTYQAETVKAQSVANKASQARSDLYRFLMNGVSHMIPFVVTGGLLIALALAVGGEPTEAGMAIPAGSMWNQILEVGVVAFTLMIPILAGYIAYAIADRPALSPGLIGGWIANNGSFYGADAGTGFIGAIIAGLLVGYFVKWITSINYHKFIQPLVPIMIAPITASLFIAGLFIFVIGAPIASLMDGLTALLTSMSSGNVILLGIVLGGMAGFDMGGPFNKVAFLFSVGMIASGQTQFMGAMACAIPVAPLGMALATAMGRKLELFESSELEAGKAAGAMGLVGISEGAIPFAAQDPMSVIPANVLGSMVAAVMAFSFGITNSVAHGGPVVALLGAMNYPLLALLCMAAGAGVTAITCVTLKKIRSQKFEAAAA

SEQ ID NO: 77340 - protein, 388 aa, Vibrio cholerae
MTNPIQNYAWGSKTALQQLFELENPNDDPQAELWMGAHPNGCSGIAINGKIVQLSDFIAQNPNLILGEYTARQFGELPYLFKILAAEKALSIQVHPNKQQAERGFAQEEQLGIALTAAQRNYKDPNHKPELVYALTEYQAMNGFRANQEILNYFIELSIDEIQPLVNVFQSNPTEQGLRDFFSGLLSLQGEAKNRALEALMAQAKQIDLPLFQLIVELENQYPNDIGLFAPLMLNVITLQPGEAMFLDAETPHAYLHGTGLEIMANSDNVLRAGLTPKYMDIDELVACTQFKHKPLEQLRLKPEVIEGCEQYPIPVADFKFAIIPPTTQQTIGVKSAEVVLPLDSSMILRHANGEQCLVRKGQSVFIPAYAEQYTIECNGRVARAFSA

SEQ ID NO: 77341 - protein, 254 aa, Vibrio cholerae
MFSNLKHVVMLMLLASAASYALAAPAPVSDLGSNVSGGSRSSEIERLERLLESRNLVQLQMQKQLDDMALEVNELRGQIEKNNYDMQQMLQRQRELFVELDRVRGEMKSPSSGAGQLPTSSNDEAAQGTFSSDANEQAAYQNAVDLILKKRDYAGAIAAFQKFQTDYPNSTFSANAHYWLGQLYFAKKEDKEAAKSFAAVVSDKGSNKRADALVKLGDIAKRNNNAEQARKFYQQAVDEYPDSASAKIAKENLK

SEQ ID NO: 77342 - protein, 356 aa, Vibrio cholerae
MKENKSRKSNDAKSITISLAMHGALVAILLWGADFTMSDPEPTGQMIEAVVIDPQLVRQQAQQIRSQREEAAKKEQERLDKLRRESEQLEKNRQAEEERIRQLKEQQAKEAKAAREAEKLREQKEQERLAAEQKAREEKERAAKAEAERKVKEEAAKKAEQERVAKEAAAAKAEQQRIEREKEAKLAEEKAKREKEVAAKAEQERLAKEKAAKEAADKAKKEKERAAKAEAERKAQEAALNDIFGSLSEESQQNNAARQQFVTSEVGRYGAIYTQLIRQNLLVEDSFRGKQCRVNLKLIPTGTGALLGSLTVLDGDSRLCAATKRAVAQVNSFPLPKDQPDVVEKLKNINLTVAPE

SEQ ID NO: 77343 - protein, 541 aa, Vibrio cholerae
MSNVSFSRHKGVTMIDVVDLSRLQFALTAMYHFLFVPLTLGMAFLLAIMESLYVMTDKQIYKDMTKFWGKLFGINFALGVATGLTMEFQFGTNWSYYSHYVGDIFGAPLAIEALVAFFLESTFVGLFFFGWDRLSKRQHLVVTWLVALGSNFSALWILVANGWMQNPVGSEFNFETMRMEMVSFADVVLNPVAQVKFVHTVAAGYTTGAMFILGISAYYLLKGRDVAFARRSFAIAASFGMASVLSVIVLGDESGYELGEVQRVKLAAIESEWHTEPAPAAFTLFGIPNQEEMRTDYAIKIPFALGIIATRSLDEQVVGLRDLRDEHVERIRTGIYAYDLLERLRAGEKTPENMAAFDEVKHDLGYGLLLKRYTDKVTDATEEQIQAAADDSIPTVWPLFWSFRIMVACGFIMLVVFGAAFIQTCRQKIEQKKWVLKAALFSIPLPWIAVETGWFVAEYGRQPWAVGEILPVNVAASALSAGEIITSMLAILALYTIFLIAEVYLMVKFTRKGPSSLKTGRYHFEQGAESVQDQVNRQVEA

SEQ ID NO: 77344 - protein, 459 aa, Vibrio cholerae
MLKIYNSLTRQKEEFKPIVAGKVGMYVCGVTIYDLCHIGHGRTFVSFDVVARYLRYLGYDLTFVRNITDIDDKIIKRAAENAETCESLTERLIQEMYADFDALNIKRPDVEPRATAYIEEIIALVERLIERGFAYVADNGDVMFEVSQYSEYGKLSKQDLDQLQAGARVDIEAAKRSPLDFVLWKMSKPGEPTWESPWGSGRPGWHIECSAMNSSILGTHFDIHGGGSDLQFPHHENEIAQSCCAHDTQYVNTWMHSGMVMVDKEKMSKSLGNFFTIRDVLGHYDAETVRYFLMSGHYRSQLNYSEENLNQARASLERLYNALRGLDRSVPAAGGEEYVTRFTAAMNDDFNTPEAYSVLFDMAREINRLKSEDMTNASALGSLMRELADVIGILYQEPEAFFQGSAEDEDAAQIEALIKLRNDSRATKDWANADLARDKLNEMGIVLEDGPNGTTWRRK

SEQ ID NO: 77345 - protein, 151 aa, Vibrio cholerae
MSCYCGNTQPYSQCCEPIHLNPHSAQVPEQLMRARFSAHILKNVEFVIETYHPSCQASNERDAISESVHSHWLRLEIISTQMGATPNEGFVHFKAFLDQEGKVFCLEERSRFLKENNCWFYIDGEFPAAIKQGRNDPCACGSGKKYKKCCG

SEQ ID NO: 77346 - protein, 187 aa, Vibrio cholerae
MVGGMMESYSKFHTILNELKHSAAQFDRQRGEHHRPLFDEVLFHCHGKLLTPCVEEAHSTLQALIREKESGRLTALRAEYLSERLLAQIAALTRELSTQNVRRNEPKPHAYFKKPINELYQELAQHQDWERRLMDLVRDKALLLEQASATEKAAAQQALLQSEQRLNRCREAKIKIEKRITTQERKA

SEQ ID NO: 77347 - protein, 70 aa, Vibrio cholerae
MSTPSIPLNEASDEIKLAVDLIFLLESHAIEPQIALAALEIVKRDFEQKLADAAVSPSIQPKTIAPLSDE

SEQ ID NO: 77348 - protein, 260 aa, Vibrio cholerae
MSPTTRNPTQGTSHMLDLQGYEASILKGALLTIEVAVLSLLLAMLLGMLGALAKMAPYRWARAIATLYTTIIRGIPDLVLMMLIFFGGQILLNNGLSWFNEFINQWLTARDPNHEWVAYLPDYVDISPFVAGVLTIGFIFGAYMAETFRGAILAVDKGELEAAKAYGMSAAMSFRRILLPQMIRHAIPGFGNNWLVLLKTTALVSIIGLEDMVRISSLAAGSTKMPFTFYMAVAIIFLFFTSVSTGLLKLLERKFSIHTR

SEQ ID NO: 77349 - protein, 260 aa, Vibrio cholerae
MDMKKWLVATALIATTISGVTQAKEWKTVRFGIEGAYPPFSWTEADGSLKGFDVDMANALCAEMQVECKIVPQDWDGIIPSLLARKYDAIIAAMSITEERKKKVDFTGKYAQIPNKFIAKKGADLAFTKEGLKGVKIGVQRATTHDKYITDNYGDTVDIVRYGSFDEAYLDLANGRIAAVLGDASALEEGMLNKPGGDAYEFVGPSLTDPKWFGEGMGIAVRKQDKELTEKLDAAITALREKGIYQQIQAKYFKYDVYGE

SEQ ID NO: 77350 - protein, 423 aa, Vibrio cholerae
MAQFIDRRLNGKNKSTVNRQRFLRRYKEQIKESVADAVNRRSITNTESGEDVSIPTRDIKEPMFHQGKGGVRERVHPGNDQFIRGDKIDRPKGGQGSGGSGEGEASADGEGSDDFVFQISKDEYLDILFEDLALPNLKKNQVNKITEWKTHRAGFQTSGVPSNISVVRSLQQSLARRTAMTAGKRRLMSELEEELERIQRSEPPQIMEEMRIKQEIEELRNKIDSVPFIDTFDLRFKNYEKRPIPSSQAVMFCLMDVSGSMDQATKDIAKRFYVLLYLFLTRTYENVEVVFIRHHTQAKEVNEHDFFYSQETGGTIVSSALKLMHEIIEARYPLGEWNIYGAQASDGDNWADDSPRCKELLSNKLLPYCQYYAYIEITRRSHQTLWHEYEKLQASFDNFAMKNIRSVEDIFPVFRELFQKENA

SEQ ID NO: 77351 - protein, 516 aa, Vibrio cholerae
MTTKAKAAPKRKVANSKRLPDGPDWTFELIERYHQEIRRVAELYRLDTYPNQIEIITSEQMMDAYSSIGMPINYNHWSFGKKFIQTEQTYKHGQMGLAYEIVINSDPCIAYLMEENTVTMQALVMAHACYGHNSFFKGNYLFQTWTDASSIIDYLLFAKNYIAECEQKFGVNEVEKLLDSCHALMNYGVDRYKRPEKISIAEEKARQEEREAYLQSQVNALWRTVPKKAVEQEKQRRFPSEPQENILYFIEKHAPLLEPWQREIVRIVRKVSQYFYPQKQTQVMNEGWATFWHYTILNHLYDEGLLSDKFMLEFLHSHTSVVAQPPYNSRYFSGINPYALGFAMFRDIKRICEEPTEEDKEWFPELAGANWLDALHFAMRNFKDESFISQYLSPKLIRDFKFFAICDDDRKNHIEISAIHDDLGYQQIREKLAAQYNLSNLEPNIQVYSVDVRGDRSLTLQYVPHDRIPLDPSYEEVLKHLHRLWGFEVKLEEVKDTGRREILATCPKKNDSESRI

SEQ ID NO: 77352 - protein, 582 aa, Vibrio cholerae
MSLHSDESNWQTFKRLWTYIRLYKAGLVVSTIALVINAAADTYMISLLKPLLDEGFGNAESNFLRILPFMILGLMFVRGLSGFASSYCLSWVSGNVVMQMRRRLFNHFMHMPVRFFDQESTGGLLSRITYDSEQVAGATSRALVSIVREGASIIGLLTLMFWNSWQLSLVLIVVAPVVAFAISFVSKRFRKISRNMQTAMGHVTSSAEQMLKGHKVVLSYGGQEVERKRFDKVSNSMRQQTMKLVSAQSIADPVIQMIASLALFAVLFLASVDSIRAELTPGTFTVVFSAMFGLMRPLKALTSVTSEFQRGMAACQTLFGLMDLETERDNGKYEAERVNGEVDVKDVTFTYQGKEKPALSHVSFSIPQGKTVALVGRSGSGKSTIANLFTRFYDVDSGSICLDGHDVRDYKLTNLRRHFALVSQNVHLFNDTIANNIAYAAEGEYTREQIEQAARQAHAMEFIENMPQGLDTVIGENGTSLSGGQRQRVAIARALLRDAPVLILDEATSALDTESERAIQAALDELQKNKTVLVIAHRLSTIEQADEILVVDEGEIIERGRHADLLAQDGAYAQLHRIQFGE

SEQ ID NO: 77353 - protein, 406 aa, Vibrio cholerae
MVGFMFHPISAFIGLRYLRGRSGDRFSRFVSYMSTAGITIGVMSLVTVLSVMNGFEAQLKSRILGVLPQAVVTEAAGKTTLSATPPDFVTALSTQRPPEPLVRSDAVVQSASQLAAGLLIGIEPQQNDPIEQHLIAGRVTALQAGEYQLFLGHLLARSLNVTVGDKVRLMVTEASQFTPLGRLPSQRNFTVAGIFNTGSDVDGQLMVTHLRDAAKLLRYDAQTISGWRLFFDDPFVVSQLAEQPLPQDWQWSDWREQRGELFQAVRMEKNMMGLMLGLIVGVAAFNIISALIMVVMEKQAEVAILKTQGMQSQHVLAIFMVQGASSGVIGALVGGLLGVLLAANLNSLMEALGVALFSVGGSLPVAIDPLQIVLVIVLAIVLSLLATLFPAYRASSVQPAEALRYE

SEQ ID NO: 77354 - protein, 1155 aa, Vibrio cholerae
MTTHSLLSLFSAQGAGDKKAIGNLHGASLALAIAELANAHTSHTLLAVPDPQTALKLLHEVEQFSHSEVALFPDWETLPYDNFSPHQDIISDRISRLYQLPSLTRGITIVPVSTLLQRQSPRDFLLQHTLIVKRGDHFSLDKLRLQLENSSYRHVDQVFGPGEYASRGSILDLFPMGSSDPFRIDFFDDEIDTIRTFDPDNQRSIAEMDEIRLLPAHEFPTTAAAIEEFRNRWRQRFEARREPESVYSQVSKGTWPAGIEYWQPLFFEHSETLFDYLPANSQLLVVGELEKAIDQFLTDVDYRYDQRNIDPLRPLLPPNELWLRKDELFAHFKTLPQVQLTSSPIELRAGRMNAQVQPLPVLAVEHQNKEPLAALRQFSEQFTGKIIFSVESEGRREALLELLQRIKLRPQSQNDFSLACQQTEKYSLVLGSAERGFIYGDNQVALICESDLLGDRVIQRRRKKDRKNVTNSDAVIRNLAELKPGQPVVHIDHGIGRYLGLQTLEAGGMVSEYVMLEYQNEAKLYVPVSSLNLISRYSGGAEEAAQLHKLGGEAWVKARRKAAEKVRDVAAELLDVYAKREIKPGFKFHLDREQYATFKATFPFEETDDQAMAINAVLSDMCQAKAMDRLVCGDVGFGKTEVAMRAAFVATDNGKQVAVLVPTTLLAQQHFENFRDRFANLPIRVEVLSRFKSAKEQKQILQDVADGKVDILVGTHKLLSSEIRFADLGLLIVDEEHRFGVRQKEKVKAMRADVDILTLTATPIPRTLNMAMSGMRDLSIIATPPARRLAIKTFVRQSEDSVIREAVLREIMRGGQVYFLHNQVETIDKVAADLEKLVPEARITVAHGQMRERELEKVMNDFYHQRFNLLVCTTIIETGIDVPTANTIIMDRADSLGLAQLHQLRGRVGRSHHQAYAYLLTPPPKAITKDAVKRLEAIASLEDLGAGFTLATHDLEIRGAGELLGEEQSGQIQSVGFTLYMEMLEQAVEALKSGKEPALDDLLREQTEVEMRLPALLPEEYIPDINTRLSMYKQIASVASKDELAELKVELIDRFGKLPDAALNLLAIAELKLNAMRLKVRKIEAHERGGYVEFYPNADINPVFLVKLLQSQPKLLAMDGPTKLKFTLPLVERSARIQFVADMLKNFQQNVLPAR

SEQ ID NO: 77355 - protein, 960 aa, Vibrio cholerae
MFKENKNKVETIIKTSEEAPSSRLNGSQRLKESGLILAFLFSIFLAVALFSFNPADPSWSQTAWGTDIHNAGGLVGAWLADTLFFVFGSLAYPLPFITAFAAWVLLRKRDEGDEIDFTLWGTRLLGLTIVLLTSCGLADINFDDIWYFSSGGVIGDVLTSLALPTLNILGTTLVLLFLWGAGITLLTGISWLRIVEWIGERSIAAFVGLFNRLRGEKAERVKPALVKPELPVEELEPTFSASMDTEIDEPAPSLRRFNIHMPEERDVPDIHFEPQVEPKVELKPEPPRQREPAPHFSRVAAQNTQVEPVSSARTQQWDATIEELEQQARLVDDYAVEDDAVPSVLTSSTLSDVEDSILTTAISVDEEEESLSENFNHSFNIEVEDEEVEPSIANLHWSDDEDELEETPSVMVSPAIESDWEDEDEPDDRDVAAFQNIVSQAQANAAAQQNPFLVQKAVNLPKPTEPMPTLELLYHPEKRENFIDREALEEIARLVESKLADYKIQAQVVDIFPGPVITRFELDLAPGVKVSRISSLSMDLARSLSAMAVRVVEVIPGKPYVGLELPNMSRQTVYLSDVIASPQFKESKSPTTVVLGQDIAGDAVVADLSKMPHVLVAGTTGSGKSVGVNVMILSMLYKASPEDVRFIMIDPKMLELSVYEGIPHLLAEVVTDMKDASNALRWCVGEMERRYKLMSVLGVRNIKGFNDKLRMAAEAGHPIYDPLWKDGDSMESEPPLLEKLPYIVVVVDEFADLMMVVGKKVEELIARLAQKARAAGIHLILATQRPSVDVITGLIKANIPTRVAFTVSTKTDSRTILDQSGAESLLGMGDMLYLPAGSSHTIRVHGAFASDDDVHAVVNNWKARGKPNYISEIIQGDHGPEALLPGEQSESDEELDPLFDQVVEHVVETRRGSVSGVQRRFKIGYNRAARIVEQLEAQGIVSAPGHNGNRDVLAPAPIRD

SEQ ID NO: 77356 - protein, 258 aa, Vibrio cholerae
MPMIHPSAIQQLLEPINHFLQCPTPDEWVEEARKPENLRVLLLDHLLCELKAGQSAMFLIRKYAVDKESELSLLDWFKPYEDFAYRKIGDIQSLKGKSQISKAIIAKSDSPYSQDLIDKMVLLIKEELHHFYQVLEIMQARNVEYESIPASRYAKSLLAHMKTHEPQTLIDKLIVGAYIEARSCERFAKLAPYLDDEIAKFYVSLLRSEARHYQDYLQLAEQIAGYDISERVAYFGRVEAELISTPDSDFKFHSGIPK

SEQ ID NO: 77357 - protein, 556 aa, Vibrio cholerae
MTESFAQLFEEFLNETQFQQGTIVKGTVVAIENGYVLVDAGLKSESAIPAEQFKNAAGELEVQVGSQVDVALDAVEDGFGETQLSREKAKRHEAWIVLEKAYEEAATVIGIINGKVKGGFTVELNGIRAFLPGSLVDVRPIRDTAHLENKELEFKVIKLDQKRNNVVVSRRAVIESESSVERDELLETLQEGTEVKGIVKNLTDYGAFVDLGGVDGLLHITDMAWKRVKHPSEIVNVGDEILVKVLKFDRDRTRVSLGLKQLGEDPWVAIAKRYPEGHKLSGRVTNLTDYGCFVEIEEGVEGLVHVSEMDWTNKNIHPSKVVNVGDEVEVMVLDIDEERRRISLGLKQCKANPWQSFAEAQAKGDKVTGKIKSITDFGIFIGLEGGIDGLVHLSDISWNVPGEEAVREFKKGDEISAVVLAVDAERERISLGIKQMENDPFNAYVSDNKKGALVNGTVTAVDAKGATIELEDGVEGYIRASEVSRDRIEDASLILNVGDKVEAKFTGVDRKNRVINLSIKAKDEAEEQEVMATLNKQDEAAFGNAMADAFKAAKGE

SEQ ID NO: 77358 - protein, 229 aa, Vibrio cholerae
MEKYMSSHTPVVTVDGPSGAGKGTLCMLLAKKLGFQLLDSGAIYRVLALAALHHGVDLESEDALVPLATHLDVQFIAEGDLVKVILEGEDVSRELRKEETGMAASKVAALPRVREALLRRQRAFASGIGLVADGRDMGTVVFPAAEAKIFLDASAEERARRRFKQLQLKGLDVKFDALLSEIQERDDRDRNRAVAPLRPAEDALVLDSTTLTIDEVVEQALQYIESKLV

SEQ ID NO: 77359 - protein, 786 aa, Vibrio cholerae
MNLERSERIEIPVLPLRDVVVYPHMVIPLFVGREKSIQCLEAAMDNNKQVLLVAQKKAETDEPKVADLFEVGTVATILQLLKLPDGTVKVLVEGQQRAKITQFYEEEYFFADAQYLVTPELDEREQEVVVRSAINQFEGFIKLNKKIPPEVLTSLNGIDEAARLADTIAAHMPLKLVDKQKVLELLDVSERLEFLMGQMESEIDLLQVEKRIRTRVKKQMEKSQREYYLNEQMKAIQKELGEMDDAPDEFETLKKKIEESKMPKEARDKAEQELHKLKMMSPMSAEATVVRSYIDWMVNVPWTKRSKVKKDLSKAEEILNADHYGLERVKERILEYLAVQSRINKLKGPILCLVGPPGVGKTSLGRSIAAATGRQYVRMALGGVRDEAEIRGHRRTYIGSMPGKLIQKMAKVGVKNPLFLLDEIDKMSSDMRGDPASALLEVLDPEQNNSFNDHYLEVDYDLSDVMFVATSNSMNIPGPLLDRMEVIRLSGYTEDEKLNIAKDHLVSKQVERNGLKPSEIVIEDSAIVGIIRYYTREAGVRGLEREISKICRKAVKKILLDKGVKTVVVNQQNLKEFLGVQRFDYGKAEESNRIGQVNGLAWTEVGGDLLTIETQSMPGKGKLTQTGSLGDVMQESIQAAMTVVRSRAEKLGINPDFYEKKDIHVHVPEGATPKDGPSAGIAMCTALVSSLTGNPVKAEVAMTGEITLRGEVLPIGGLKEKLLAAHRGGIKTVLIPKDNERDLEEIPDNVIADLQVLPVQWIDEVLKVALEQDPTGVSFESKKSDA

SEQ ID NO: 77360 - protein, 426 aa, Vibrio cholerae
MTDKSKEGGSSKLLYCSFCGKSQHEVRKLIAGPSVYICDECVDLCNDIIREEIKDVLPKKESAALPTPRKIREHLDDYVIGQEHAKKVLAVAVYNHYKRLRNGDTTSEGVELGKSNILLIGPTGSGKTLLAETLARLLDVPFTMADATTLTEAGYVGEDVENIIQKLLQKCDYDVAKAERGIVYIDEIDKISRKSENPSITRDVSGEGVQQALLKLIEGTVASVPPQGGRKHPQQEFLQVDTSKILFICGGAFAGLDKVIEQRVATGTGIGFGADVRSKDNSKTLSELFTQVEPEDLVKYGLIPEFIGRLPVTATLTELDEAALIQILCEPKNALTKQYAALFELENVDLEFREDALKAIAAKAMKRKTGARGLRSILEAVLLETMYELPSMEEVSKVVIDESVINGESAPLLIYSANESQAAGAE

SEQ ID NO: 77361 - protein, 332 aa, Vibrio cholerae
MFKPLTLIAASILAVTSFNAAANCDPGEIVIKFSHVTNTDKHPKGIAASLLEKRVNEEMNGKACMQVFPNSTLYDDDKVLEALLNGDVQLAAPSLSKFEKFTKKYRIFDLPFLFEDVDAVDRFQSSAKGEELKNAMTRRGVKGLEFWHNGMKQISANKPILVPADAKGLKFRVQASDVLVAQFEQIGANPQKMSFAETYGGLQTKVIDGQENTWSNIYGQKYFEVQDGTTETNHGILDYLVVTSSKWWDGLPADVRDQFAKILNEVTIERNAESNKVEELNKQYIIEAGGVVRTLTPEQRQQWVDALKPVWQKFEKDIGADLIEAALAANQK

SEQ ID NO: 77362 - protein, 323 aa, Vibrio cholerae
MKKLLSIVLGLALSAPVLANEVSFEQYVERLKQQAREEGISERILNEAFRDVEYKPRSVVADKNQPEKKLTLDEYIPRAVPEWKVKQAQSLYEKHYTELQRIGKQYGVQPRFIVALWGVESNFGAFTGNFRVIDALSTLAYEGRREEFFRKETMAALQILEQGHIAPEAMKGSWAGAMGQCQFMPSSFLNFAADGNGDGKKDIWGTRSDVFASTANYLSQSGWDDKYTWGRQVKIPKGFDHALEGRQPEKGKTLQEWSKLGVTRYDGKPLPALSDDIKAWLIMPDDEAGRIYLVYNNYNVLMKWNRSHYFALAVSHLADRIAF

SEQ ID NO: 77363 - protein, 102 aa, Vibrio cholerae
MVNNRNKRLVMLCSIYKSPKKEGTYLYIPKRDDFSQVPDTLKQMFGKPIFVMLVNLEQRRLAQVNVEKVKQSMQEQGFFLQLPPPPENLLEQHKERKARQTP

SEQ ID NO: 77364 - protein, 626 aa, Vibrio cholerae
MNKMANPTTALLTERRFLPYFITQFLGAFNDNIFKNVLLLFVAFAGPQALPISSNLFINLAAGLFILPFFLFSATAGVLADKLEKSRYIRWVKLLEIAIMLCGAIGFITQSYGISLFLLFLMGTQSAFFGPVKYALLPQQLKSEELVPGNALVETGTFLAILLGTLGAGLIASADNAHYFAAAAVVIFAVLGYLSSRAIPLAPASAPHLEFRWQPITQTKQTLRIAKRDRAIFQSIMAISWFWFLGAGYLTQFPNFTKLHLNGNEAAVSFLLALFSVGIAVGSLACDKLSGHRIEVGIVPLGSVGISFFGYLMATSIPADLPIFSTFADFVTYSALWPLFAYLLLIGVFGGVFIVPLYAMLQQRAKVTERAQVIAALNIYNSLFMVGSAALGIVCLSVLEMSIPQLFALLAVLNVLVALYIFLQVPIFAVRFLVWILTHTLYRVRHKNLHHIPEQGGALLVCNHVSYMDALLLSAVCPRLIHFVMEEEYANLPLLKRFLKRAGVIPISANNRASLRRAFADIEHSLNEGNLVCIFPEGRLTADGEMNPFMRGLDLILHRSPVPVVPLALKGLWGSYFSRYKGRACQGVPRRFRSQLEIEAGMPVAPEQANSAVMHEKVAQLRGDWR

SEQ ID NO: 77365 - protein, 277 aa, Vibrio cholerae
MEKKTLLTHCPDAPGLISKITNICYKHQLNIIHNNEFVDNASGHFFMRTELEGYFNDATLLADLDHALPQGTRRKLISSSRKRIVILVTKEAHCLGDILMKNYDGSLDVDIAAVVGNYDTLQRLTERFDIPYHCVSHEGLSREAHEQALLDVIDQYQPDYLVLAKYMRVLTPAFVERFHHKIINIHHSFLPAFIGAKPYQQAYERGVKIIGATAHFVTNDLDEGPIIKQDVIPVDHTFSAQDMAQAGRDVEKNVLSKALNKVLNDHVFVYGNKTVIL

SEQ ID NO: 77366 - protein, 331 aa, Vibrio cholerae
MTIKVGINGFGRIGRFVFRAAQERNDIEIVGINDLIDVDYMAYMLKYDSTHGRFNGTVEVKDGNLIVNGKTVRVTAERNPADLKWGEIGVDVVAEATGLFLTDETARKHIEAGAKKVVLTGPSKDKTPMFVMGVNHKTYAGQDIVSNASCTTNCLAPIAKVLNDNFGIESGLMTTVHATTATQKTVDGPSAKDWRGGRGASQNIIPSSTGAAKAVGVVLPELNGKLTGMAFRVPTANVSVVDLTVNLQKAASYDDIKAAMKAASEGELAGILGYTEDAVVSTDFNGDTRTSIFDADAGIALTDKFVKVVSWYDNEIGYSNKVLDLIAHISK

SEQ ID NO: 77367 - protein, 481 aa, Vibrio cholerae
MSSTLRRTKIVATLGPSTESPEILEAIIRAGANVVRMNFSHGTAEDHKNRAQKVREIAAKLGRHVALLGDLQGPKIRVSTFKEGKIILNEGEHFILDAELAKGEGTQESVGIDYKKLPQDVCNDDILLLDDGRVQLQVMRVEGNKIHTKVLVGGPLSNNKGINKKGGGLSADALTEKDKNDIRLAAEIQVEYLAVSFPRNGEDMKFARRLAQESGLYARMVAKVERAETVSCDENIDDIVRASDVIMVARGDLGVEIGDPELIAVQKKLISRAKKLNRVVITATQMMESMISNPMPTRAEVMDVANAVLDGTDAVMLSGETAAGKYPVETVKAMAEVCIGAEKMIESNEQNYRIKSVFRTEEEAIAMSTIYAANHLEGVKAMVTLTESGRTALMTSRLNSVFPIFAMSANQATLNRCALLRGVIPFYFDTKQASGLEAAIAALDALKERNLLEEGDLVIITQGDIMGVEGSTNCMRILPVY

SEQ ID NO: 77368 - protein, 255 aa, Vibrio cholerae
MFVDSHCHLDKLDYQDLHADVSDVLDKAHQAKVEYLLSVGVTLDSFPKMLAMIEPFSQVYASCGVHPLDVQSDFSLDLFHQYAQHPRVVAIGETGLDYHYQPETADLQKLRFRQQIETAVALNKPLIIHTRNAQQDTLQLLREGKAQQCGGVIHCFTEDLAFAQAAMELGFYISISGIVTFRQATDLKEVVKALPLDRLLIETDSPYLAPVPHRGKENQPAYVVEVAAYIAALKGVSLTEVAQKTTQNFQNLFLR

SEQ ID NO: 77369 - protein, 324 aa, Vibrio cholerae
MSNLNSLYPWLVPVWQPWQAGLAAGKISSATLIQASEGVGVESLVELMARTLMCTSSQSEPCGFCHSCGLMQSGNHPDFHVVKPEKIGKSITVEQIRQMNRIAQESSQLSGYRLIVIEPADAMNESSANALLKTLEEPAPNCLFILVTSRIKHLLPTIVSRCQRLVLPAPTTALVVEWLKGQGITTPAYALHLCADSPLKTRAFMLEGGAEKYHELESQLMNALSGDVNAQLKCIALIDADLTTHLYWVWCVLTDAQKIHFGVQQDYYPPASAALAGRFTYSKLHVQTASLERLMEQLNQFSGLNTELLLLQWLYQFSDEETCL

SEQ ID NO: 77370 - protein, 212 aa, Vibrio cholerae [sequence omitted]

SEQ ID NO: 77371 - protein, 277 aa, Vibrio cholerae
MSRFFLWSESMYWVNGQRRNEVPIHDRSFQYGDGCFTTILTKEGQVQQWSSHKARLQACLDILHIPEPNWDRVWQGLQSMILPQEKAGLKIHISRGLGGRGYSPTQVSESIVTISAFAFPAHYQAWRDKGLAVGICQQRMGLNPLLAGHKHNNRLEQILLKREMDNAGWDDGVCLDINGKVIETTAANIFWCRDGTMFTPCLRHAGVAGVARRQILELAQQQEIPIVIDEFTLEDLLSAEEVFITNALLEVAPVTQIGQQRLTIGSMTRRFQESSNS

SEQ ID NO: 77372 - protein, 414 aa, Vibrio cholerae
MSKRRVVVTGMGMLSPVGNTVESSWKALLAGQSGIVNIEHFDTTNFSTRFAGLVKGFDCEQYMSKKDARKMDLFIQYGIAAGIQALEDSGLEVNEENAARIGVAIGSGIGGLELIETGHQALIEKGPRKVSPFFVPSTIVNMIAGNLSIMRGLRGPNIAISTACTTGLHNIGHAARMIAYGDADAMVAGGAEKASTPLGMAGFGAAKALSTRNDEPQKASRPWDKDRDGFVLGDGAGIMVLEEYEHAKARGAKIYAEVVGFGMSGDAYHMTSPSEDGSGGALAMEAAMRDAGVTGEQIGYVNAHGTSTPAGDVAEVKGIKRALGEAGTKQVLVSSTKSMTGHLLGAAGSVEAIITVMSLVDQMVPPTINLDNPEEGLGVDLVPHVARKVESMEYAMCNSFGFGGTNGSLIFKRM

SEQ ID NO: 77373 - protein, 110 aa, Vibrio cholerae
MVRPETSRLQLSLVRINYGIIALGEICKGKEKMSNIEERVKKIIVEQLGVDEAEVKNESSFVEDLGADSLDTVELVMALEEEFDTEIPDEEAEKITTVQAAIDYVTSNAQ

SEQ ID NO: 77374 - protein, 248 aa, Vibrio cholerae
MSQFMNLEGKVALVTGASRGIGKAIAELLAERGAKVIGTATSESGAQAISDYLGDNGKGMALNVTNPESIEAVLKAITDEFGGVDILVNNAGITRDNLLMRMKEEEWSDIMETNLTSIFRLSKAVLRGMMKKRQGRIINVGSVVGTMGNAGQANYAAAKAGVIGFTKSMAREVASRGVTVNTVAPGFIETDMTKALNDEQRTATLAQVPAGRLGDPREIASAVAFLASPEAAYITGETLHVNGGMYMI

SEQ ID NO: 77375 - protein, 312 aa, Vibrio cholerae
MKERFMSKFAIVFPGQGSQAVGMLADLAEQYAVVKQTFAEASEVLGYDLWALVQDGPVEDLNQTFRTQPALLAASVAIWRVWQQLGLEQPAVLAGHSLGEYSALVCAGVIDFKQAIKLVELRGQLMQQAVPAGTGAMYAIIGLEDEAIAKACADAAQGEVVSPVNFNSPGQVVIAGQKDAVERAGVLCKEAGAKRALPLPVSVPSHCALMKPAADELAKTLAELEFNAPQIPVINNVDVVAETDPVKIKDALIRQLYSPVRWTECVEQMSAQGVEKLIEMGPGKVLTGLTKRIVKTLEGVAVNDVASLDAVK

SEQ ID NO: 77376 - protein, 316 aa, Vibrio cholerae
MYSKILGTGSYLPSQVRTNADLEKMVETSDEWIVARTGIRERRIAADNETVADMAFFAAQNAINMAGIDKHDIDMIIVATTSASHTFPSAACQVQGKLGIKGCPAFDLAAACSGFMYALSIADQHVKSGMCKHVLVIGADALSKTCDPTDRSTIILFGDGAGAVVVGASNEPGILSTHIHADGEFGDLLSLEVPVRGGDSDKWLHMAGNEVFKVAVTQLSKLVVDTLKANNMHKSELDWLVPHQANYRIISATAKKLSMSLDQVVITLDRHGNTSAATVPTALDEAVRDGRIQRGQMLLLEAFGGGFTWGSALVKF

SEQ ID NO: 77377 - protein, 193 aa, Vibrio cholerae
MQNYQLVLASTSPFRQQILAKLKLPFVTAKPDCDETPLIGETPEHLLMRLAENKARSCFLADPSLVIGSDQVCVIDDQIIGKPLTTEKAVEQLLRQSGQAITFYTGLALFNNQTQQTQVLCDTFTVHFRTLSESMARRYVEAEQPLHCAGSFKSEGLGIALFERLEGDDPNSLIGLPLIKLIQLLENEGLNVI

SEQ ID NO: 77378 - protein, 894 aa, Vibrio cholerae
MPVTNLAELDALVARVKAAQAEFATFSQEQVDKIFRAASLAANQARIPLAQMAVEESGMGIVEDKVIKNHFASEFIYNKYKDEKTCGILEEDDNLGTMTIAEPVGIICGIVPTTNPTSTAIFKSLISLKTRNGIIFSPHPRAKNSTNAAAKLVLDAAIAAGAPKDIIGWIDQPSVELSNALMKHDGIALILATGGPGMVKAAYSSGKPAIGVGAGNVPVVIDETADIKRAVASILMSKTFDNGVVCASEQAAIVVSEVYDEVKERFATHKAHVLSKADADKVRKVLLIDGALNAKIVGQPAAAIAEMAGVKVPADTKVLVGEGLGKVSYDDEFAHEKLSPTLGLFRADNFEDAVAQAVTMVEIGGIGHTSGLYTNQDVNADRIRYFGDKLKTARILVNIPTTHGGIGDLYNFNVAPSLTLGCGSWGGNSISENVGPKHLINKKTVAKRAENMLWHKLPKSIYFRRGSLPIALSDLEGKKRAFLVTDRFLFNNGYADDVVALLKAQGMEVQTFFEVEADPTLSVVEKGAAAMQSFQPDVILALGGGSPMDAAKIMWVMYEHPDTHFEELAMRFMDIRKRIYKFPKMGKKAELVCITTTSGTGSEVTPFAVVTDDKTGAKYPLADYELTPQMAIVDANLVMNMPKSLTAFGGYDAVTHALEAYVSVLANEYSDGQALQALKMLKEYLPSSYANGAKDPIAREKVHNAATIAGIAFANAFLGVCHSMAHKIGAEFHLPHGLANALLIANVVRYNANDNPTKQTAFSQYDRPQARRRYAEVADHLGLSQPGDRTAQKIERLLTWLDELKVNLDIPKSIQAAGVAEADFLAKVDELAVEAFDDQCTGANPRYPLIAELKEVLLASYYGKPFVEGQTFEGTTVIVKKADQEAAKAPKAKK

SEQ ID NO: 77379 - protein, 647 aa, Vibrio cholerae
MTRLFIAEKPSLARAIADALPKPHKKEQGCIRCANGDIVTWCIGHLLEQVEPDAYDERYKKWNMADLPIIPEQWQLRPRKSSSQQLTVVRKLLKEATQIIHAGDPDREGQLLVDEVIDYCKVPKSKKETVQRLLISDLNLSAVKRALQGLRSNREFIPLSVSALARSRADWLYGMNMSRAYTLLGKKAGYQGVLSVGRVQTPVLGLVVRRDEEIEHFIPHDYFTLDALIPYQNGTEYFDIRARWKPSEACLPWQDEEGRVTNRKLVDNVASRIANQPATVTESEQDQTKQAAPLPYSLSALQIDAAKRYNFSAQQVLDLCQSLYEKHKLITYPRSDCRYLPKEHLAQAPDVVAAIANNAQEMVTAVNDADLSLRSKAWNDSKVDAHHAIIPTPKKASVNALSGHEMKVYQLIARQYLMQFYPAAIYAEAKLVFNIAGGIFIAKGRQLLSAGWKVLTGQQDEQEECVDKVPPLPVGIVLQCREGEIKQRQTEPPRHFTEATLLQAMTGIARFVADKELKKILRETDGLGTEATRAGILDTLFKRGLLQRDNKLIKSTPAGRGLIHALPSEATYPDMTAHWEHQLQAIAEKGQAYQPFMQTLQGRLEQLIEQVQVAPVPVSLQALPAVSKPAFKRTRRAPKSKARTYKA

SEQ ID NO: 77380 - protein, 254 aa, Vibrio cholerae
MHMELRMVGRLSWITLFTLFLVGCSSAPDDSSPHSQVNDPLESFNRQMWTINYDYLDPYVVRPVSLFYVGYVPKPVRSGIANFLSNLDEPASMVNNLLMGNGTKAVDHFNRFWINTSFGLLGLIDIASEAGIKKYDDKAFSDAVGHYGVGNGPYLMVPGYGPYTVREVTDVVDGMYFPLAYLNIWAGVGKWALEGMETRAALVSQEALLQDSPDPYSLARDAYLQRQAFKAEIQVDDYDPEEEEYLDEYLNEGL

SEQ ID NO: 77381 - protein, 222 aa, Vibrio cholerae
MMPAFIQFIHRELLIAFRRQADVFNPLWFFIIVITLFPLSVGPEPALLARIAPGIVWVAALLAALLSLERLFRDDFQDGALEQAMLTPLPLSVVVLAKVTAHWLLTGLPLILISPLLAILLSFDSSAWLAVVLTLLLGTPTLSFIGAIGVALTVGLQKGGVLLSLLVLPLFIPVLIFATSAIDAAALGMPYNGQLAILAAMLMGSMTLTPFAISAALRVSVH

SEQ ID NO: 77382 - protein, 258 aa, Vibrio cholerae
MIVWSVANQKGGVGKTTTTITLAGLLSQQGKRVLLVDTDPHASLTTYLGYDSDGVPASLFDLFQLREYNEASVKPLILNTDIQGIDLIPAHMSLATLDRVMGNRSGMGLILKRALLALRHVYDYVLIDCPPILGVMMVNALAASDRILIPVQTEFLAMKGLERMVRTLAIMQKSRSREFKVTIVPTMYDKRTRASLQTLNQLKKDYPDKVWTSAVPIDTKFRDASLQRLPASHFAEGSRGVFAYKQLLLFLERLAIDE

SEQ ID NO: 77383 - protein, 239 aa, Vibrio cholerae
MISLEQAKELVQLLEQGRQDDANRLFTYVYESANNPMFKEIGMLTRDLHEALKNFQIDERFSEIATDEIPDARERLHYVIQKTEVAANKTMDAVDRCMPIADKLHESLLLIRPEWNGLMNGRIELMHFKSLCHRIDDLLSQVEGDSSELRGELTEILMAQDFQDLTGQIIKRVINLVNEVEKRLVEILTVFGAAQKEQKADKATVASIEPEGPILNPHERIDAVSSQDEVDDLLSSLGF

SEQ ID NO: 77384 - protein, 130 aa, Vibrio cholerae
MEAILNKNMKILIVDDFSTMRRIVKNLLRDLGFNNTQEADDGLTALPMLKKGDFDFVVTDWNMPGMQGIDLLKNIRADEELKHLPVLMITAEAKREQIIEAAQAGVNGYIVKPFTAATLKEKLDKIFERL

SEQ ID NO: 77385 - protein, 599 aa, Vibrio cholerae
MICLTSKMMAFLPYFLELKGKRVNIQALINDRVSQAIEAAGAPAGTPALVRQSAKAQFGDYQANGIMGAAKQLGTNPREFAQKVLDVLNLEGIASKTEIAGPGFINIFLSEEFLAAQAEAALADARLGVAQEAPKTIVADYSAPNVAKEMHVGHLRSTIIGDAVVRTLEFLGHKVIRANHIGDWGTQFGMLIANLERVQKASGEVSMELSDLEAFYRESKKLYDEDEQFAETARNYVVKLQGGDPFCLEMWKKLVDVTMIQNQRNYDRLNVSLTRENVMGESMYNDMLPQIVSDLKAKGLAVEDDGAQVVFLEEFKNKDGEPMGVIIQKRDGGFLYTTTDIACAKYRYETLGADRVLYFIDSRQHQHLMQAWTIVRKAGYIPENVSLEHHAFGMMLGKDGRPFKTRAGGTVRLADLLDEAQERAKALIESKNPELSAEEKANIANTVAMAAVKYADLSKHRTTDYVFDWDNMLAFEGNTAPYMQYAYTRVASVFAKAGVDMNELTGHIQITEEKEKALIAKLLQFEEAVQSVAREGQPHIMCSYLFELAGIFSSFYEACPILVAEQESIKQSRLKLAALTAKTIKQGLALLGIDTLERM

SEQ ID NO: 77386 - protein, 76 aa, Vibrio cholerae
MKLSQMQAGERGIILALDGLSDTVRKKLMVMGVLPNTEVVLIRRAPMGDPLQVEVRGVSIALRENIAANIDVERAQ

SEQ ID NO: 77387 - protein, 290 aa, Vibrio cholerae
MSILINKDTKVICQGFTGGQGTFHSEQAIAYGTQMVGGVSPGKGGTTHLGLPVFNTVREAVEVTGATATVIYVPAPFCKDAILEAIDAGIKLIVTITEGIPTTDMIDVKVKLEQTGVRMIGPNCPGVITPDECKIGIMPGHIHKKGKVGIVSRSGTLTYEAVKQTTDEGFGQSTCVGIGGDPIPGSNFIDILKMFQEDPATEAIVMIGEIGGTAEEEAAAFIKANVTKPVVSYIAGVTAPPGKRMGHAGAIISGGKGTAEEKFAALESAGVKTVKSLADIGKALREVTGW

SEQ ID NO: 77388 - protein, 936 aa, Vibrio cholerae
MHNGVMKAWLESSHLAGANATYVEDLYELYLSDPDLVSEEWKRVFDGLPAHPTNVVEQPHSRVRDYFRRLAQETKHYNVQVSDPEVDAKQVKVLQLINAYRFRGHEAAKLDPLGLWNRPEVAELNPSFHNLTQEDMEETFNVGSFAIGKDTMKLKDIYQSLQKIYCGSVGAEYMHITDTEQKRWIQQRLEPVVGTPVFSKEEKRTFLEELTAAEGLERYLGAKFPGAKRFSLEGGDALVPMTKEMIRHAGASGMREVVIGMAHRGRLNMLVNVLGKKPQDLFDEFAGKHGEGWGTGDVKYHQGFSADFATPGGDVHLALAFNPSHLEIVNPVVMGSVRARQDRLGDEDGSKVLPITIHGDSAIAGQGVVAETFNMSQARGFCVGGTVRIVVNNQVGFTTSNPRDTRSTMYCTDIAKMVQAPIFHVNSDDPEAVAFVTRLALDYRNEFKRDVVIDLVCYRRHGHNEADEPNATQPLMYQKIKKHPTPRKLYADVLTERGECDLETATQLVNEYRDALDHGEVVVKEWRPMAMHSVDWSPYLGHDWHIPWNSEYAMERLQDLGRRVCQYPESHVLHSRVEKIYQDRLSMISGEKMLDWGMAETLAYATLLDDGKRIRISGQDSGRGTFFHRHAVLHNQNDASTYIPLSQIHAGQGPFEVFDSVLSEEAVLAFEYGYATAEPSGLTLWEAQFGDFANGAQVVIDQFISSGEQKWGRLCGLTMLLPHGYEGQGPEHSSARLERYLQLCAEQNMQVVVPSTPAQVYHMIRRQVVRPMRRPLVVMSPKSLLRHPLCVSSMEDLAHGTFQPAIGEIDALNPSQVKRVVFCSGKVYYDLLEQRRANEQQDVAIVRIEQLYPFPLEEVQAAIANYTNVVDYVWCQEEPQNQGAWYSSQHNFRAAIPAGADLKYAGRPASASPAVGYMSVHMKQQKALIEDALTLA

SEQ ID NO: 77389 - protein, 588 aa, Vibrio cholerae
MTIPVRSFDAVVIGAGGAGMRAALQISEQGLTCALLSKVFPTRSHTVSAQGGITVALGNSHKDDWQWHMYDTVKGSDYIGDQNAIEYMCKNGPESVIELERMGLPFSRFENGTIYQRPFGGQSKEFGGEQAARTAAAADRTGHALLHTLYQQNVKHKTTIFSEWYALDLVKNQDGAVLGCTAICMETGEICYFKAKATVLATGGAGRIYASTTNAHINTGDGVGMALRAGVPMQDMEMWQFHPTGIAGAGVLVTEGCRGEGGYLLNKDGERFMERYAPNAKDLAGRDVVARSMMIEIREGRGCDGPWGPHIKLKLDHLGRDVLESRLPGICELSRTFAHVDPVKEPIPVIPTCHYMMGGVPTQVSGQAIKQDSHGKDVEVQGLFACGEIASVSVHGANRLGGNSLLDLVVFGRATGLHLGETLRAQAEARPATASDIEASLARTMRWENSKGGEDPVVIRKDLQRCMQNNFSVFREGKAMAEGLEELKVIRERLKNAHLADKSTEFNTQRIECLELDNLMETAFSTAVAANYRTESRGAHARFDYPERDDENWLCHSIYNPETEQMSKREVNMTPVYRDPFPPKVRTY

SEQ ID NO: 77390 - protein, 431 aa, Vibrio cholerae
MVMADKKATLHIEGKAPIELPIMDGSLGPQVIDVRTLGSNGYFTFDPGFLATASCESQITYIDGAKGILLHRGYPIDQLANNADYLEVCYILLYGEAPNRKQYEEFKKIVTRHTMVHEQIASFFHGFRRDAHPMAVMCGVVGALAAFYHDSLDINNDTHREIAAYRLLSKMPTLAAMCYKYSVGQPFIYPRNDLSYAENFLHMMFATPCEEYEVNPIVARAMDKIFTLHADHEQNASTSTVRLAGSSGANPFACIAAGIASLWGPAHGGANEACLRMLEEIGSVDKIPEYVRRAKDKDDPFRLMGFGHRVYKNYDPRATVMREACHEVLKELSIQDPLLDVAMELERIALSDEYFIEKKLYPNVDFYSGIILKAIGIPVSMFTVIFAMSRTIGWIAHWNEMHSDPDNRIGRPRQLYTGQKLRDFTPLHERS

SEQ ID NO: 77391 - protein, 257 aa, Vibrio cholerae
MSALLNYKLEGSGETVVLIHGLFGSLDNLGLLARDLKNDHQVLSLDLRNHGLSFHSDEHNYALMAQDVNQLLEHLNLTSVVVIGHSMGGKVAMKLADIAAEKVRQLVVLDMSPVAYSQRRHDNVFAGLEAVLVQKPTSRSEVMAILAQHIEQEGVRQFLGKSLMSEQNVMTWRFNVAALKAHYAEILGWDIIAKCRIPTLFIKGADSDYLTTQHQPMVQAQFSQAKAHVIANTGHWLHAEKPAEVIRAIRKFIDVPV

SEQ ID NO: 77392 - protein, 338 aa, Vibrio cholerae
MMSQQFNVAIFGATGAVGETMLEVLQEREFPVDELFLLASERSEGKTYRFNGKTVRVQNVEEFDWSQVHIALFSAGGELSAKWAPIAAEAGVVVIDNTSHFRYDYDIPLVVPEVNPEAIAEFRNRNIIANPNCSTIQMLVALKPIYDAVGIERINVTTYQSVSGAGKAGIDELAGQTAKLLNGYPAETNTFSQQIAFNCIPQIDQFMDNGYTKEEMKMVWETQKIFNDPSIMVNPTCVRVPVFYGHAEAVHVETRAPIDAEQVMDMLEQTDGIELFRGADFPTQVRDAGGKDHVLVGRVRNDISHHSGINLWVVADNVRKGAATNAVQIAELLVRDYF

SEQ ID NO: 77393 - protein, 387 aa, Vibrio cholerae
MPQIPTMKILIDENMPYAQALFSQLGEVILKPGRTLTADDLIDVDALMIRSVTKVNDALLAKANRLKFVGTATAGMDHVDQALLRERGIFFTAAPGCNKVGVAEYVFSVLMVLAQQQGFSVFDKTVGIIGAGQVGSYLAKCLSGIGMKVLLNDPPKQAQGDEREFTELETLLKQADVITLHTPITRGGEWPTHHLIDAAILEQLRSDQILINAARGPVVDNAALKARLQQGDGFTAVLDVFEFEPQVDMELLPLLAFATPHIAGYGLEGKARGTTMIFNSYCEFLGSAHCANPASLLPKAPVPKVYLERAWDEETLRTLTQIIYDVRKDDAQFRREIHQPGAFDLMRKHYWDRREYSAVTLAGGADCHLAPLAKLGFQVEVCDEPTI

SEQ ID NO: 77394 - protein, 361 aa, Vibrio cholerae
MAGNSIGQHFRVTTFGESHGIALGCIVDGCPPGLTISEADLQVDLDRRRPGTSRYTTQRREPDEVKILSGVFEGKTTGTSIGLLIENTDQRSKDYSDIKDKFRPGHADYTYHQKYGVRDYRGGGRSSARETAMRVAAGAIAKKYLQQEFGIEVRAYLSQMGEVAIDKVDWNEIENNDFFCPDVDKVAAFDELIRELKKEGDSIGAKIQVVATGVPVGLGEPVFDRLDADIAHALMSINAVKGVEIGDGFDVVRQKGSQHRDPLTPQGFRSNHSGGILGGISSGQDIVANIALKPTSSITVPGETIDVNGEPTELITKGRHDPCVGIRAVPIAEAMLAIVLMDHLLRHRGQNQGVVTTTPKI

SEQ ID NO: 77395 - protein, 376 aa, Vibrio cholerae
MAESDGQERTEEATPRRLQQAKEKGQVARSKELASVSVLVVGAVSLMWFGEILAKGLMVAMQRLFELSREEIFDLGKLFDIIGGSLVNLLLPLLMILSTLFIAALIGAAGVGGISFSAEAAMPKLSKMNPLSGLKRMFGMQSWVELLKSILKVLLVSGVAFYLIEASQKDLFQLSLDVYPQNIFHALDILLNFVLLISCSLLVVVAIDIPFQIWQHAEQLKMTKQEVKDEYKDTEGKPEVKGRIRMLQREAAQRRMMAALPQADVIITNPEHFSVALRYKQNTDKAPVVIAKGVDHMALKIREIAREYDIAIVPAPPLARALYHTTELEQQIPDGLFVAVAQVLAFVFQLKQYRRKGGQRPKLNEENMPIPPDMRY

SEQ ID NO: 77396 - protein, 348 aa, Vibrio cholerae
MAKDNKDGGEVVESTIDISEIPGEEKAAILLLSLNEEDAAGIIRHLEPKQVQRVGSAMARAKDLSQTKVSAVHRAFLEDIQKYTNIGMGSEDFLRNALVAALGADKANNLVDQILLGTGSKGLDSLKWMDPRQVASIIINEHPQIQTIVLSYLEPDQSAEILAQFAQRDALDLLMRIANLEEVQPSALAELNEIMEKQFAGQAGAQAAKIGGLKAAADIMNYLDNNIESVLMEGMREKDEDLATQIQDLMFVFENLVEVDDQGIQKLLRDVPQDVLQKALKGADDTLREKIFKNMSKRAAEMMKDDLEAMPPIKVSDVEAAQKEILSIARRMADNGEIMLGGGADEFL

SEQ ID NO: 77397 - protein, 302 aa, Vibrio cholerae
MFKSQTAILPEAGPFALYTLLKVRQNHAHVLQALKALPALVEEINQNQPGAELTVSVAFSKGFWSHFEMASPPELIDFPELGEGETHAPSTDVDVLIHCHATRHDLLFYTLRKGISDIAQDIEIVDETYGFRYLDARDMTGFIDGTENPKAEKRAEVALVADGDFAGGSYVMVQRFVHNLPAWNRLNLAAQEKVIGRTKPDSVELENVPAASHVGRVDIKEEGKGLKIVRHSLPYGSVSGDHGLLFIAYCHTLHNFKTMLESMYGVTDGKTDQLLRFTKAVTGAYFFAPSQVMLQELTLKNQ

SEQ ID NO: 77398 - protein, 553 aa, Vibrio cholerae
MKQGLILKSVLSAAIIASLAGCATAPAQQWEADKTYKLTILHTNDHHGRFWQNQYGEYGMAARKTLIDQLRADIEAQGGSVLLLSGGDINTGVPESDLQDAEPDFKGMSKIGYDAMALGNHEFDNPLEVLFKQKEWANFPMLSANIYDKATGKRLFEPYHIFDKQGIKIAVIGLTTEDTAKIGNPEYIGGIDFRDPKEEAKKVIAELKKKEKPDLIIAVTHMGHYQNGEHGVNAPGDVALARYLPAGELDMIVGGHSQEPVCMEGPNLVKKNFKPGDECKPDIQNGTYIVQAYEWGKYVGRADYEFRNGELNMVSYNLIPVNLKKKVEVNGETQRVFATSEIKEDSAMLEFLRPFQEKGQEQLSIKIAHSNGKLEGDRNVVRFEQTNLGRMIAMAHMQRAKADFAVMNSGGVRDSIQAGDITYKDVLKVQPFGNIVSYVDMNGQEVLDYLNVVATKPVDSGAYAQFAGISMTVADGKVSNVVIGGKQLRLDATYRFTVPSFNAAGGDGYPKITDHPGYVNTGFVDAEVLKDYLEANSPIDVNRFAPAGEIVYR

SEQ ID NO: 77399 - protein, 283 aa, Vibrio cholerae
MEHKIVHVGDIPVANDKPFTLFAGMNVLESRDLAMQICEHYVKVTDKLGIPYVFKASFDKANRSSVHSYRGPGLEEGMKIFQELKETFGVKIITDVHTEAQAQPVADVVDVIQLPAFLARQTDLVEAMAKTGAVINVKKPQFMSPGQVGNIVEKFAECGNDKVILCERGSCHGYDNLVVDMLGFGVMKQASNGSPIIFDVTHSLQMRDPSGAASGGRREQTVELAKAGLATGIAGLFIEAHPNPDKARCDGPSALPLDKLEPFLAQMKALDDLIKSFAHIDIR

SEQ ID NO: 77400 - protein, 127 aa, Vibrio cholerae
MYEGLKHFHLFTIGVSVVMLSIRYVLMMMNSAHLERKFFKIFPHVNDTLLLLSGIGLIFITGFIPFTAAAPWMTEKFTCVLAYIALGFFALKLGRNKLLRSFAFFGALGWLAMAGKIAVAKAPILFG

SEQ ID NO: 77401 - protein, 286 aa, Vibrio cholerae
MSVTIEAALKAATEQLQQSGSDSPALDAAVLLCHVLAKPRSYLLTWPDKILEKPTLASLELLLARRRAGEPMAYILGEREFWSLPLKVSPSTLIPRPDTERLVELALDKAALIDGELLDLGTGTGAIALALASELPTRQVTGIDLRPEAAELARENATRLAIHNAQFFQGSWFSPLADGTKFALIVSNPPYIEENDPHLSLGDVRFEPKSALVAAENGLADIRHISTHAPHFLLDGGWLLFEHGYDQGVAVRTILRDLGYQNIITEQDYAGHDRVTLGQYKTEREA

SEQ ID NO: 77402 - protein, 362 aa, Vibrio cholerae
MKASILSKLESLVERYEEVQHLLGDPTVIGDQNKFRALSKEYSQLEEITQCFQAYQQAKEDLVAAEEMAQEDDAEMREMAQDEIKAAKAAIERLTDELQILLLPKDPNDDRNCFLEIRAGAGGDEAGIFAGDLFRMYSRFAEKKGWRIEVMSSSEAEHGGYKEMIAKVNGDGAYGTLKFESGGHRVQRVPATEAQGRIHTSACTVAVMPEIPEAEIPEIKASDLKIDTFRSSGAGGQHVNTTDSAIRITHLPTGIVVECQDERSQHKNKAKAMSVLAARIAQAEESKRAAEISDTRRNLLGSGDRSDRIRTYNYPQGRVSDHRINLTVYRLTEVMEGDMQSLIDPVIHEHQADQLAALADQN

SEQ ID NO: 77403 - protein, 419 aa, Vibrio cholerae
MSLLAIGINHNTASVELREKVAFGPEKLSLALNQLSTSSHVKGGVILSTCNRTEIYCDVRSASKNKVIEWLSQFHQVSLDELKPSLYVHEEQAAIRHLMRVACGLDSLVLGEPQILGQVKQAYAEARENHAVNPATEKLFQKAFSVAKRVRTETEIGGSAVSVAYAACTLAKHIFESLADATVLLVGAGETIELVAKHLAGHHCKRMIVANRTRERALSLAQQFGADVIALNEIPDYLAQADIVISSTASPLPIIGKGMVESALKARRHQPMLLVDIAVPRDIEPQVGKLNDAYLYSVDDLQSIVDSNIEQRKVEAIQAEAIVSEESATFMSWMRSLQAVDSIRDYRKQANEAREELLNKSLQALAAGGDPEKLLIELSNKLTNKLIHTPTRALQTAAEQGEPAKLAVIRQSLGLDDLN

SEQ ID NO: 77404 - protein, 314 aa, Vibrio cholerae
MPDMKLFAGNAIPELAQRIADRLYISLGDATVSRFSDGEVAVQINENVRGSDVFIIQSTCAPTNDNLMELVVMIDAMRRASAGRITAVIPYFGYARQDRRVRSARVPITAKVVADFLSNVGVDRVLTIDLHAEQIQGFFDVPVDNIFGTPVLLEDMKARNLEDPVVVSPDLGGVVRARATAKALGDIDIAIVDKRRPRANVSEVMNLIGDVEGRDCVIVDDMIDTGGTLCKAAEALKERGAKRVFAYATHAVFSGNAAKNIKNSVLDQVIVTDSITLSKEMAATGKVTQLTLSSMLAEAIRRISNEESISAMFN

SEQ ID NO: 77405 - protein, 383 aa, Vibrio cholerae
MASPKHKIVYTLSKLNKVTVMGFKCGIVGLPNVGKSTLFNALTKAGIEAANFPFCTIEPNTGVVPVPDPRLDALAAIVKPERILPTTMEFVDIAGLVAGASKGEGLGNKFLANIRETDAIGHVVRCFENENIIHVAGKVSPLEDIEIINLELALADLDSCERAILRQSKRAKGGDKEAKFELAVLEKLQPVLSEGQSARSVNLTKEELLAVGYLNLLTLKPTMYIANVNENGFENNPYLDAVVEFAAKENASVVAVCAAIEAELSELEEEERDEFLADLGIEEPGLNRVIRSGYDLLNLQTYFTAGVKEVRAWTIPVGATAPQAAGKIHTDFERGFIRAEVIGYNDYIQFNGESGAKDAGKWRLEGKEYIVKDGDVIHFRFNV

SEQ ID NO: 77406 - protein, 235 aa, Vibrio cholerae
MAGVNNVGQSGLSYIDQLKALQEQKKPDETTGQKSLKQEDFLSLLTKQLAQQDPFKPVSNDQMIAQMASFATVDGIGKMNTQFESLNSSMTSNQALQASSLVGRDVLVPGAAGMKKPDGGMAAMVKLPQSIDNLFIRIENEAGQLVRTFDVGAKSSGDNRVEWDGKDQNGNPLPGGKYKVKASGLLDGESKEFEVSTYANVNSVLLGKGDGNVLLNLAGFDAPVRLAEVLEVGKA

SEQ ID NO: 77407 - protein, 509 aa, Vibrio cholerae
MPKIVRSIALTRVLEYRPKFRMLSSQQKNLTKVIQMTVKTRFAPSPTGYLHVGGARTALYSWLYAKSQGGEFVLRIEDTDLERSTQAAVDAIIEGMTWLGLEWDEGPYYQTKRFDRYNQVIDQLLAEGKAYKCYAPKELLDEIRAEQEANKEMPRYDANHPKIKAVNDAAKEGEPCCIRFRNPKEGSVVFDDQIRGRIEIRNDQLDDLIIRRTDGTPTYNFCVVVDDVDMGISHVIRGEDHINNTPRQINIYKAMGATIPTFAHCAMILGDDGAKLSKRHGAVSVMQYRDDGYLPEALLNYLVRLGWGHGDQEIFSRDEMINLFSLNAISKSASAFNTDKLLWLNNHYIKTSEPEYVAKHLEWHFENQGINKATGPALAEVVKLVGERCNTLVELAQQSRYFYEDFAEFDADAAKKHLRGVAKEPLMLALSKIEALTEWNTEALHHVIAQVCEELEIGMGKIGMPLRVAVTGGGQSPSVDAVMNLIGQERVIARIKMALEYIETREANA

SEQ ID NO: 77408 - protein, 915 aa, Vibrio cholerae
MDIPQGGVIMNHFALALRGLNCMGCARKLERQLNQDLTVEIETLTPTSIELHTHATLNEVLTSIESLGYQGGTEQTYQLQGLNCGRCVNKLTTHLSAQAEIAKLHVSKERLSLVTTLTAEQVKALVAEVGYQAIEAEQESTFAPAASIDEKETDTPDAENSSNTEATEASSQTLSLLIKGMTCASCVASVEKALLSVEGVQSAQVNLTEQSALVRGIFANPQPLLNAIQSSGYQAEILDDPAQQQAKQQAQLEALQKEHKQSALLGIALGTPLMLWGVFGGNMMIRNSSDQMVWGGIGTICFALLLTAGRHFFMNAWQALTHGRATMDTLVALGTGAAWFYSMLVVAWPQTFPDAARHVYFEATAMIIGLISLGHYIETKAKSNTNRSLQALLNLQPQQATLVTEQGDQSIAVADIQLGMSLRIKPGEQVPVDGVVSTGHSYLDESMLTGEPIPVLKEAGAKVAAGTLNQDGSLVITATGIGAQTMLARIIQMVRQAQSSKPAMARLADQISSVFVPVVVVIAILSAALWYLYGPDPKASYMLVVATTVLIIACPCALGLATPLSITVGIGKAAEMGILIRDANVLQTASQVDTVVFDKTGTLTLGKPSIQSLHVLQGDENQLLALAYALEQQSEHPLAKAICDYAKQRNISPVEISQFTNQRGRGLLADYQNQTVLVGSLAFMQEQGIDLSMAESTLEKFAAQAWTPVAVAYRGMLQGVLAIADPIKPTSAQAVRKLNELGIHTVMLTGDHTSVANAIAKELGISQVIAQVLPDQKAQHIQALQQQGRKVAMIGDGINDAPALALADIGIAMGSGSDVAIESAQMTLLNSSPTSVVSAIELSKATLRNMKQNLFGAFIYNTLGIPIAAGVLYPAFGFLLSPVVAGAAMALSSITVVSNANRLRWSKISFDQHSQ

SEQ ID NO: 77409 - protein, 298 aa, Vibrio cholerae
MPNLKEFTHSMLTRFACCLLWLFIQPLHAEPLYWSATKGSTQLILLGSLHVGSDQLYPLPDQLAQKLKQSAGLVVETDIRHQSNITLPATTLSSEQVLSDEQLFVLDGIAQQLRLDAQQIRQQPPWSASLILQMRQFLEMGYQADRGIDLYFMQQAEQHQLPILSLETLQFQVDLLAHLPNSGQELLVSLIDEWENNTQLTECMIESWKKGDEKNLLQMLTLTGMSAELEAHMLTERNRDWAEKLTHPQFLPQQGKPYLVVVGTLHLIGKQSLLSILEQKGFSIQQLNQSQTASCSFL

SEQ ID NO: 77410 - protein, 208 aa, Vibrio cholerae
MKIVEVKHPLVKHKLGLMREGDISTKRFRELATEVASLLTYEATSDFETEKVTIEGWNGPVQVDQIKGKKVTVVPILRAGLGMMDGVLEHIPSARISVVGIYRDEETLEPVPYFNKLATNIEERIAMVVDPMLAIGGSMIATIDLLKEKGCNQIKVLVLVAAPEGIAALEKAHPDVELYTAAIDEKLNDKGYIVPGLGDAGDKIFGTK

SEQ ID NO: 77411 - protein, 440 aa, Vibrio cholerae
MDDLYLHFVQQLARYPFRKILLALSGGVDSQVLLALLARGRDEFGWDVTAVHVHHGLSPNADQWAQYCQRCCREVGMACQIEYVQLDVASGESIEKLAREARYRVLAPHVNAQTLLLLGQHADDQLETFLLALKRGSGPKGLAAMAAYAPFAEGHLLRPLLTVSRQHIEAYAKQHKLTWVIDESNADIRYERNFLRHQVTPVLTERWPSIRQAVQRSAELCAEQEALLQEFLAEALKKAITAEGGLSIAVLAEGSEGMRRQLIRAWFAHHRLPMPSRQHTERIWCEVALASEDANPKLKLNHIEVRRFQHCLYLVPPEKDLSGWRSALVPEQRLPLPQGLGHLQLTSKAGGNIKLPDDPSQLWVSFEPQGLEACPVGRVGSRKLKKLFQEYGVPSWRRRQTPILMYQNRVVCVADLFVDRDWSGQDCELVWFKSHDSVPK

SEQ ID NO: 77412 - protein, 319 aa, Vibrio cholerae
MSLNFLDFEKPIVELETKIQALRDVSRHSTSASVDLDKELEQLEKKSLELKKKIFSDLGAWQVAQLARHPQRPYTLDYLKHIFTEFDELAGDRAYADDKAIVGGIARLEGRSVMVIGHQKGRETREKVKRNFGMPKPEGYRKALRLMEMAERFNMPIITFIDTAGAYPGVGAEERGQSEAIAKNLKVMSGLKVPVICNVVGEGGSGGALAIGVGDYVNMLQYSTYSVISPEGCASILWRDSDKAPQAAEAMGLIAPRLKELELIDEIIEEPLGGAHRDHKQTAENVKATLLRQLADLDALDHENLLERRYQRLMNYGYC

SEQ ID NO: 77413 - protein, 1164 aa, Vibrio cholerae
MDTPCMSDPKFIHLRIHSDFSMVDGLSKVPPLVKKVAAMGMPAMALTDFTNLCGLVKFYSTAHNCGVKPIIGADFTLQSEEFGDELTKLTLLAKNNVGYKNLTLLISKAYLRGHVQHQPVIDKAWLVEHAEGLIVLSGGKSGEVGRALLKGNQQQVERCIEFYQTHFADHFYLELIRTGRADEESYLHFALDVAEQYDLPVVATNEVVFITEESFEAHEIRVAIHDGYTLEDPRRPKNYSPKQYLRSEAEMCELFADIPEALANSVEIAKRCNVTVRLGEYFLPNFPTGGMAIEDFLVMKSREGLEERLEFLFPDPEVRAKRRPEYDERLQVELDVINQMGFPGYFLIVMEFIQWSKDNDIPVGPGRGSGAGSLVAYALKITDLDPLEYDLLFERFLNPERVSMPDFDVDFCMDKRDQVIDHVAEMYGRDAVSQIITFGTMAAKAVIRDVGRVLGHPFGFVDRISKLVPPDPGMTLEKAFIAEPALQELYDADEEVKELIDKCRILEGCTRNAGKHAGGVVISPTAITDFAPIYCDAEGNFPVTQFDKNDVETAGLVKFDFLGLRTLTIIDWALGLVNPRLKKAGKPPVRIEAIPLDDARSFRNLQDAKTTAVFQLESRGMKELIKRLQPDCFEDIIALVALFRPGPLQSGMVDNFIDRKHGREAISYPDEKWQHESLKEILEPTYGIILYQEQVMQIAQVLSGYTLGGADMLRRAMGKKKPEEMAKQRAVFQEGAEKNGVDGELAMKIFDLVEKFAGYGFNKSHSAAYALVSYQTLWLKTHYPAEFMAAVMTADMDNTEKVVGLVDECKNMGLTVLPPDINSGLYRFNVDDNGAIVYGIGAIKGVGEGPIEAILEARNKGGYFKDLFDFCARIDLKKVNKRVIEKLILAGALDRLGPHRAAMMASVDDAVRAASQHHQAEAFGQADMFGVLTDAPEEVEQKYTQVPEWPEKVRLEGERETLGLYLTGHPVDEYLKELTKYTSCRLNEAAPTRRDQSLTVAGLVIAARVMTTKRGTRIGLMTLDDRSGRMEVMLYSEALDRYAEWLEKDKILVVSGQVSFDDFNGGLKMSAREVMDLGSAREKFARGLSISILQSQIDQQFFERFSHILEPHRAGTVPVNVYYQRPDARARLTLGTEWRVTPSDTLLDELKQLLGHDQVELEFN

SEQ ID NO: 77414 - protein, 206 aa, Vibrio cholerae
MAKKPSIELPPFEIPAGYALIAGVDEVGRGPLVGDVVTAAVILDPNRPIMGLNDSKKLSEKKRLALFPEIQVKALAWAVGRCSPQEIDELNIFQATMVAMQRAVAGLRIQPDLVLIDGNKIPKLPMEAQAVVKGDLRVAQISAASIIAKVIRDQEMEALDKQYPQFGFAKHKGYPTAAHFAAIEQHGVIEQHRKSFGPVKRALGIE

SEQ ID NO: 77415 - protein, 379 aa, Vibrio cholerae
MNRPLRIGIVVGELSGDTLGEGFIKAIRARYPDAEFVGIGGPKMNALGCQSLFDMEELAVMGLVEVLGRLPRLLKVKAELVKYFTANPPDVFVGIDAPDFNLRLELSLKQAGIKTVHYVSPSVWAWRQNRIHGIAAATHLVLAFLPFEKAFYDKFNVPCEFIGHTLADSIPLASDKLAARQLLGLDEQRRWLAVLPGSRGSEMKMLAEPFIATCQKLQARYPDLGFVVALVNAKRRAQFEQAWQQVAPELNFVLVDDTARNVITAADAVMLASGTVALECMLLKRPMVVGYRVNAFTAFLAKRLLKTPYVSLPNILAGEELVKELLQDHCTVDNLYHEVSRLLESDNQALMDKFTEMHQWIRKDADQQAAQAVLHLIQK

SEQ ID NO: 77416 - protein, 153 aa, Vibrio cholerae
MMTLTTDKKTMNITEIQSLLPHRYPFLLIDRVTDYEEGKYLIGLKNVSVNEPQFTGHFPQLPVFPGVLILEAMAQATGLLAFKTFGAPKENELYYFASIDEAKFRKPVTPGDQLMVEVEFLKERRGIALFNGVAKVDGDVVCSAQLKCARREF

SEQ ID NO: 77417 - protein, 351 aa, Vibrio cholerae
MTTLTLAELATITGGELFGDPTALVSAVAPMDKAQLGHVTFLSNPKYSKHLGDCKATVIMVKTSERELCPSNALVVADPYVAFAKVAQALDSTPSPAHGIAPSAVIAEDAKLGHNVSIGANAVIESGVQLGDNVVIGAGCFIGKQARLGDNTKLWANVTIYHKVEIGSDCLIQSGTVIGADGFGYANERGEWIKIPQLGSVRIGDRVEIGACTTIDRGALDDTVIEDNVIIDNQLQIAHNVHIGYGSALAGGTVIAGSTRIGKYCIIGGASVINGHIEIADGVTITGMGMVMRSIEEKGMYSSGIPLQTNKEWRKTAARVHRIDDMHKRLKALEKLLEQSDTVQPDNSQAE

SEQ ID NO: 77418 - protein, 280 aa, Vibrio cholerae
MKQRIITALILAPLVILGILYLPFAWFMLALAVVTLLGFWEWTQFVNQPSRMLAMIPALLVGGISVALIDFQFPAISNMNTAHFIVLGIGSLWWLVSSGLAITYPRSRPLWEHSSTVRHLFGLFTLLPFFWSVLFLRADTYLSDPLYGAKLVLFVCFLVWAADSGAYFVGKSLGKHKMAPAVSPNKTIEGLVGGIVTAMLVGYWVAECFGIQFSSMPVMLLIILLTVVISVLGDLVESMFKRVSGIKDSSNIIPGHGGILDRIDSLTAAFPVFALLYFLF

SEQ ID NO: 77419 - protein, 256 aa, Vibrio cholerae
MFVVFLMQNLSLSQDVLPKHIAVIMDGNGRWAKAQGKPRVFGHKNGVAAVRKTISTSARLGIKAVTLFAFSSENWRRPEEEVGVLMELFMTVLSTEIKKLHKNNLRLRVIGDKSRFSERLQTKIAQAEQLTASNTGMVVNIAANYGGQWDILQATQALAEKVTQGELQPSDIDEDVFKQHLTMADLPDVDLLIRTSGECRISNFMLWQLAYAEMYFTPVFWPEFDENCLIEAVTWFVNRERRFGCTGEQVKALMEN

SEQ ID NO: 77420 - protein, 185 aa, Vibrio cholerae
MINEIKKDAQERMEKSVEALKNGLSKIRTGRAHPSLLTGISVDYYGAPTPLNQVANVIAEDARTLAITVFDRELTQKVEKAILMSDLGLNPMSAGTIIRVPLPPLTEERRRDLVKIVRGEAEGGRVAVRNIRRDANNDLKALLKDKEISEDDERRAQEEIQKLTDAAVKKIDDVLAAKEKELMEV

SEQ ID NO: 77421 - protein, 243 aa, Vibrio cholerae
MTTNPKPAYQRILLKLSGEALQGSEGFGIDPTVLDRMAQEVKELVELGVQVGVVIGGGNLFRGAGLAKAGMNRVVGDHMGMLATVMNGLAMRDALHRAYVNARLMSAIPLNGVCDDYSWSDAIRELRQGRVVIFAAGTGNPFFTTDSAACLRGIEIEADVVLKATKVDGVYSADPVANPDAQLYDKLAYNDVLEKELKVMDLAAFTLARDHKMPIRVFNMNKPGALRRVVMGEAEGTLISDVQ

SEQ ID NO: 77422 - protein, 280 aa, Vibrio cholerae
MAVTAALVKELRERTGAGMMECKKALVETNGDIELAIENMRKSGAAKAAKKAGNIAAEGTIMIKEGEGIAALVEVNCQTDFVAKDSNFVAFANQVTDAALASKASVEELQAQFEEARVALVAKIGENINIRRVQYVEGEALATYRHGDRIGVVVAGSADVETLKHVAMHVAASRPEFLTPDDVPAEVVAKEREVQVGIAMNEGKSKEIAEKMVEGRMKKFTGEVSLTGQPFVMEPKKTVGEILAEKGATVSAFIRLEVGEGIEKQEGLSFAEEVALAQKG

SEQ ID NO: 77423 - protein, 242 aa, Vibrio cholerae
MASVSMRDMLTAGVHFGHQTRYWNPKMKQFIFGARNRVHIINLEKTVPMFNEALAELAKVGEKKGKVLFVGTKRAASESVKEAALASNQYYVNNRWLGGMLTNWKTVRQSIKRLKELEVQSTDGTFDKLTKKEALMRTREMEKLEKSLGGIKDMGGLPDALFVIDADHEHIAIKEANNLGIPVFAVVDTNSSPDGVDYIIPGNDDAIRAVQLYLNAAAQAINEGRNKDVAAVAEKDGFVEAE

SEQ ID NO: 77424 - protein, 881 aa, Vibrio cholerae
MHGRAMPYQSPITFQEPQLTVESLKQQLESFTEYQKQEFFDHHPVTDLVLGRSEYMDLLLHRLWQFFGFDELVEVSLVAVGGYGRGELHPLSDIDLLVLSQQPLSEQVANKISQFLTLLWDLKLEIGHAVRTVEQCAEIGKADLTVATNLQEARLLCGCEETFHRLKMVIHSESFWPSEIFYQAKVREQKERHARYHDTTYNLEPDIKSTPGGLRDIHTLSWVARRHFGATSLYEMSRFGFLTDAEYRELVECQDFLWRVRFALHIELKRYDNRLTFAHQVQVARHLGYFGEGNRGIEMMMKEFFRTLRRVAELNKMLLKIFDKAILNNGEEAEAVIIDDDFQRRGNMIEARKPALFQARPETILDMFLHMASDSTIESVAPATMRQLRTARRRLNKFLHTLPAAREKFIELVRHPNALHKAFSQMHKLGVLAAYLPQWNQIVGQMQFDLFHVYTVDEHSIRLLKHIHLFSDANNHDRHPICCEIYPKIQKKELLILAAIFHDIGKGRGGDHSEIGADEAFDFCIEHGLSKPEAKLVAWLVKNHLLMSVTAQRRDIYDPDVIIEFAKKVRDEERLEYLVCLTVADICATNPELWNSWKRTLLAELFYSTQRALRRGLENPVDVRERIRHNQQMASALLRKEGFSSREIEVLWQRFKADYFLRHTHKQIAWHCTHLLRHEDSSKPLVLLSKKATRGGTEVFIYTKDQAALFATVVAELDRRNLNVHDAQIMASKDGYVLDTFMVLDQNGQAIEEDRHQALIRHLVHVLEDGRPTTQKARRIPRNLQHFKVKTQVDFLPTKSKKRTLMEFVALDTPGLLATVGATFAELNLDLHAAKITTIGERAEDLFILTNAQGTRLNEEEEQHLREKLIEHVAELAPSAQ

SEQ ID NO: 77425 - protein, 334 aa, Vibrio cholerae
MQRFNQRVWMMFGEFNLIDKYFSNRQAQRKDVHLALGDDCAIVKVPENSRVAISTDTLVAGTHFLAQANPAWVAHKALASNISDLAAMGATPAWVSLALTLPEIDDAWLTPFCDAFFELAKYYNVQLIGGDTTKGPLSITLTVQGFLPKEQAMLRSGAKVGDWLYVTGDLGDSQAGLDVILDPEKRHLPFADILEQRHYLSTPRIVAGQALVHLASSAIDISDGLIADLQHILRRSNVGASIDVSLLPLSKELLQFVDSVTSAQQYALTSGEEYELCFTIPEENRGSLENALAHCGTKVTCIGQIRPAGTFELHNQGKKLDWQLAGYDHFKVKA

SEQ ID NO: 77426 - protein, 156 aa, Vibrio cholerae
MGASVKPAARRNARQFALQAIYSWQITKENVATIEEQFLTSGKYDEEEHRAAEPALAAPETDVSYFRDLLAGVVLNHNELDSKLRPFVSRPMQDLDMMELALLRLAMYEMTRREDVPYKVVINEAIELAKVFAAEDSHKFVNGVLDKAAPHVRKKA

SEQ ID NO: 77427 - protein, 173 aa, Vibrio cholerae
MLESGDSHLMNRVKGKLMKVIEGGFPAPNAKIAIVISRFNSFINESLLSGAIDTLKRHGQISDDNITVVRCPGAVELPLVAQRVAKTGDYDAIVSLGCVIRGGTPHFDYVCSEMNKGLAQVSLEFSIPVAFGVLTVDTIDQAIERAGTKAGNKGAEAALSALEMINVLSEIDS

SEQ ID NO: 77428 - protein, 369 aa, Vibrio cholerae
MPISTPQEIIEDIRQGKMVILMDDEDRENEGDLIMAAEHITPAAINFMATHGRGLICLTLTKERCRRLGLNPMVQDNNAQYTTNFTVSIEAAEGVTTGISAADRARTVQAAVAKEAKAADLVQPGHIFPLAAQDGGVLTRAGHTEAGCDLARLAGLEPASVIVEILNDDGTMARRPDLEVFAEKHGLKLGTIADLIEYRNHTETTIERVAQCKLPTEYGEFELVTYRDIIDKQIHFALRKGDITSAPTLVRVHLQDTFTDLLHSNRAAERSWPLATAMQRIGQEGGVLVILGHEESSELLLHRVKMFELQDKGEAPAMAKKQGTSRRVGVGSQILADLGVKEMRLLSSPNKKYHALGGFGLNVVEYVCE

SEQ ID NO: 77429 - protein, 217 aa, Vibrio cholerae
MFTGIVEAVGKLTAIIPKGSDVTISVDVGKLDMGDVKLGDSIATNGVCLTVVAFDQRSFSADLSMETLKKSGFAQYQVGDRVNLEKAMLPTTRFGGHIVSGHVDGVGEIVERIPVGRAVDLWVNMPAEISKYVAEKGSITVDGISLTVNDLRKNAFKLTIVPHTSAETTIDEFQVGRRVNLEVDVLARYMERLLQGQQESEPQSRLTMAFLQQNGFA

SEQ ID NO: 77430 - protein, 367 aa, Vibrio cholerae
MPMFTSFDHQMMSRAIELAWRGRFTTSPNPNVGCVITRGEQIVGEGFHFRAGEPHAEVHAMRQAGELTRGATAYVTLEPCSHYGRTPPCAEGLIKAGVAKVICAMQDPNPQVAGKGVQMLRDAGIEVEVGLLEADARVLNRGFLKRMETGMPFVQLKMAASLDGQTALANGKSQWITSPAARKDVQRFRAQASAILSTSQTVLADNASLAVRWYDLPSSVQAQYAEADLRQPLRVILDRQHQLHPELALYQTPSPVLRVASENAELCISAENGKLDLRELLALLAQQHNVNQLWVEAGSQLAQSLIEQKLVDEIILYLAPKLMGSDGRGLFGALGLTEMAEAIELKIEDCRMVGADLRIIATPKTKD

SEQ ID NO: 77431 - protein, 417 aa, Vibrio cholerae
MMDLTVLGKAAKAASFQLATASTAQKNQALASMADQLEAQSASILAANAKDIALGREAGLSDAMLDRLLLNESRLQAIANDVRNVIKLNDPVGSEIDSRVLENGMSLARRRVPLGVVGVIYEARPNVTIDIAALCLKTGNAAILRGGKETFFSNMELVKVIQSALDKAGLPAASVQYIEKPDRELVTQLLKMDDYVDMIIPRGGAGLHKMCKENSTVPVIIGGFGISHIFVDESADLDKSVAVIENAKVQRPSACNALDTLLVHQAIAKPLLDKLIAKLNGKVAFVAEPKAKALMSSAAELRDAQAGDFDTEWLSYTLGVKVVQDVQEAIEHMREHNASHSDAIMTNDLYNAELFVNTAGSAAVYVNASTRFTDGAQFGLGAEVAVSTQKLHARGPMGLEELTSYKWVGKANYLSRS

SEQ ID NO: 77432 - protein, 706 aa, Vibrio cholerae
MMFWDSEVAKRLLAQGALRPLDVQFARFIGKQAVLAGHNAAESELLSVLSAALSAELGRGHICLPLCDAQGNRCDLAALIGLYGEASLQHSERWLAVDWQALLQASPLVGQQGEAVPLMFDGSRLYLHRYWHYEKQLAARLTELAAPQRLSPAELANLRERLNTLFARDYLGLWQALQQKPLSSVERIQLLNDRLDVVESDALDWPAIEAVVEKAQRAADLQALEQLIPLTHCLNWQKVAAAVALTRRFAVISGGPGTGKTTTVTKLLAALISQSMAQGKVPEIKLIAPTGKAAARLTESMGKAVSQLAIEPEIAAAIPSSSSTIHRLLGAIPGSAEFRHHTRNPLHLDLLVVDEASMVDLPLMVKLVEALPKHARLILLGDKDQLASVEAGAVLGDICTFLNQGYGHEQGAQLAELTGFATLRQTASKTVNPVADCLCMLQKSYRFDARSGIGQLAKAINSGSPARVEAVWQQSFSDIEHFALSGEHYQQLLQTLVQAYRPYLSLLNQPTEQFESTQQSMLTLAKSALDAFSRCRLLCALREGDFGVMGLNTRIERALNAHKLIKTQEEIWYHGRPIMVTRNDHGLGLYNGDIGLCMRDRDDDQGRLKVYFELPDGSIKAVLPSRVPQHETAYAMTIHKSQGSEFDLTLLILPPDYSPILTRELVYTGITRAKKQLKLYCDNKVLQRAIKVKTQRASGLVARLEQ

SEQ ID NO: 77433 - protein, 322 aa, Vibrio cholerae
MIRAAKAKVMGAPTPMAGLALGIASLGWSWENMIAAHGVAQWVGAAIASVLLIVLAFKFLWHGHLLRQDLAHPVVGSVVPTFAMATMVVSASLGHFYPVAGDALWLFAVGLHILFLVSFLYHRAQAFELHHMVPSWFVPPVGIIVADVSFSGHPALAPIAYACLVFGMLAYAVMLPMMIYRFIFTHEIPDAAKPTLAIMAAPASLSLAGYLTVVSEPSPVIVALLFGIAVLMTAIIYLAFTRLLRLPFSPGYAAFTFPMVIGATALFKMAHWMENIGVAEHYVAQVHWLASLELIVATVVVSYVAIRYLAFYQPHKVLVGSR

SEQ ID NO: 77434 - protein, 459 aa, Vibrio cholerae
MIVKAKRAYVCNECGADFPRWQGQCNACGSWNSISEVRLAASPQVARNERLVGYAGALEAKVQTLADIDLQEVPRFTSGFKELDRVLGGGIVPGAAILIGGNPGAGKSTLLLQTMCLLSGQMPTLYVTGEESLQQVAMRASRLGLPKQHLKMLSETNVDRICQIAEQEKPRIMVIDSIQVMHVADVQSSPGSVAQVRESATALTRYAKQNNVAVFIVGHVTKDGTLAGPKVLEHIIDCSILLDGDTDSRFRTLRSHKNRFGAVNELGVFAMTGQGMREVSNPSAIFLSRGEEATSGSSVMVVWEGTRPLLVEIQALVDYSQLANPRRVAVGLEQNRLSLLLAVLHKHGGLQMADQDVFVNVVGGVKVTETSADLALLMALLSSFRDRPLPKDVVVFGEVGLAGEIRPVPSGQERLNEAFKHGFKKAIVPIANMPKGGIEGMQIHGVKKLSDAIAAFDEL

SEQ ID NO: 77435 - protein, 259 aa, Vibrio cholerae
MSELKVAALRALKLMDLTTLNDNDTDAKVIQLCHDAKSPVGNTAAICIYPRFIPIAKKTLREQGTPEIRIATVTNFPHGNDDIEIAVAETKAAVAYGADEVDVVFPYRALIAGNEQVGFDLVKQCKAACGDKVLLKVIIETGELKQEALIKKASQICIEAGADFIKTSTGKVPVNATPEYARMMLEVIRDMGVAKTVGFKPAGGVRTAEDAQQYLAMADEILGGDWADSRHYRFGASSLLTNLLNTLEVTDQKADPAAY

SEQ ID NO: 77436 - protein, 286 aa, Vibrio cholerae
MYEKLIGAHVSASGGVELAPVRAHEIGANAFALFTKNQRQWAAKPLEASSIRAFKANCKKWGFGSEAILPHDSYLINLGAPEPEKLDKSRAAFVDEMLRCDQLGLTLLNFHPGSHLQQVSEEACLATIAESINLAHRQVPNVIAVIENTAGQGSNLGWRFEHLAAIIDQVEDKERVGVCLDTCHTFAAGYDLRTKAACDETFAEFERVVGMHYLRAMHINDSKGKLASRVDRHHSLGMGEIGWECFEYIAQDARFNGIPLILETIDPDIWATEIATLRKFSTQKEN

SEQ ID NO: 77437 - protein, 426 aa, Vibrio cholerae
MKLYNIKENDEQVSFGQAVRQGLGRNQGLFFPAQLPKFDDIDALLAEDFVSRSSKILSALIGDELPADKIRAMVDSAFQFAAPIAKVKEGVYALELFHGPTLAFKDFGGRFMAQSLAAVSNGGKITILTATSGDTGAAVAHAFYGMPDINVVILYPKGKISPLQEKLFCTLGKNIHTVAINGDFDACQALVKQAFDDAELRQQIGLNSANSINISRLMAQICYYFEAAAQMSKAERENLVISVPSGNFGNLTAGLLAKALGLPVKRFIAATNANDTVPRYLETGRWEPKPTVATTSNAMDVSQPNNWPRIEELCQRMGWGLETLGKGAVSDEESAQAVQELYDLGYLCEPHGSIAYRVLEEQRQPQETGLFLCTAHPAKFKEVVDDILGTDIALPAPLAKHAAMELLSQELNADFAALRALLVNVK

SEQ ID NO: 77438 - protein, 318 aa, Vibrio cholerae
MSVVVYAPASIGNVSVGFDVLGAAVSPIDGTLLGDRVKVEAGAEAFTLKTAGRFVDKLPANPQENIVYDCWQVFARELEKKSVVLKPLTMTLEKNMPIGSGLGSSACSIVAALDALNQFHASPLDETELLALMGEMEGKISGSIHYDNVAPCYLGGVQLMLEELGIISQSVPSFDDWYWVMAYPGIKVSTAEARAILPAQYRRQDIVAHGRYLAGFIHACHTQQPELAAKMIKDVIAEPYREKLLPGFAKARNYAASAGALATGISGSGPTLFSVCKEQAVAERVARWLEQNYVQNEEGFVHICRLDKQGSKVTGSEL

SEQ ID NO: 77439 - protein, 825 aa, Vibrio cholerae
MHLEEGMRVLKFGGSSLADPERFLRAADIIANNAQQEEVAVVLSAPGKTTNKLVAVIESALRQGEVEAQIVELESSFYALLDGIKAQLPNLDDSAYQQQVHSSMTQLRQFVHGITLLGMCPDNVNARIISKGERVSIQLMKAVMEAKGLPANLVDPVKYLLAKGDHLEAMVDVEISTQRFRQAPLPQQHVNIMPGFTAGNAQGELVCLGRNGSDYSAAVLAACLRADCCEIWTDVDGVYNCDPRLVDDARLLKSLSYQEAMELSYFGASVLHPKTIAPIAQFQIPCLIKNSFNPQGAGTLIGQDTGEDKLAIKGITTLSNLTMVNVSGPGMKGMVGMASRVFGAMSAADVSIVLITQSSSEYSISFCIEAQHKALAQQALADAFELELKDGLLEPVEFVDNVAIITLVGDGMRTSRGVASQFFSSLAEVHVNVIAIAQGSSERAISAVIPDDKISEAIKACHENLFNSKHFLDVFVVGVGGVGGELVDQIQRQQAKLAEKGIMMRVCGLANSKGMLLDSQGLPLEQWRDRMINADQAFSLENLVALVQRNHIINPVLVDCTSSDEIANQYADFLAAGFHVVTPNKKANTASMSYYHQLRNVARHSRRKLMYETTVGAGLPVIENLQNLIAAGDELEKFSGILSGSLSFIFGKLDEGMTLSQATQLAKEKGFTEPDPRDDLSGMDVARKLLILAREAGYELELSDVDVEQALPAGFDASGSVEEFMARLAQADAAFAERVAQAKAEGKVLRYVAQIVDGQCQVRIVAVDENDPMFKVKEGENALAFYSRYYQPIPLVLRGYGAGSEVTAAGVFSDVMRTLGWKLGV

SEQ ID NO: 77440 - protein, 1530 aa, Vibrio cholerae
MHTQCGCVLNNWKDVSMVDKAQRSRGLYTPELEHDACGIGFVAHLKNRKSHQVVTQALDMLARMEHRGGQGCDPCSGDGAGILLQKPHEFLLEEAVKLGIKLPSFEKYGVGVVLFPKDEHKRAQCRDILERNAKRLDLDVIGYRVLPTNNSMLGADPLSTEPQFEHVFISGGPGMQPDELERKLYVLRNYTVRVCLESVSNIGDDFYINSMSYKTLVYKGQLTTEQVPQYFLDLQNPTMVTALALVHSRFSTNTFPKWRLAQPFRYIAHNGEINTVRGNLNWMKAREAILQSKLFTQAEIDMLLPICQEGASDSANFDMVLELLVLSGRSLPHALMMMIPEAWQENKAMDPKRRAFYQYHANVMEPWDGPASVCFTDGVQVGATLDRNGLRPSRYTVTKDDFLIMASESGVVEIDPANVEYRGRLQPGRIFVADLEQGRIISDEEVKDGIASAQPYEKWVEENLLSLKKLPDADNVHSQPSPERLLHRQQAFGVSSEEVNDIILTLAQTGYEPLGSMGADWPVAVLSHQSQHLSNYFKQLFAQVTNPPIDPIRERMVMSLNTYIGRDQNLLAETPAHCRKVELESPVISNAELEKIRAIDNEHLQAKTLDIVFRASDEPGKLERALKRICQYAEDAVIDGYSIILLTDRAVNSNHAAIPAMLAVGAVHHHLIRKGLRSKCGIVVETGDARETHHFATLLGYGANAVNPYLVVETIVDLKRQKKLDADVSVEKYFENYRKGVNGGLLKIFSKMGISTLQSYHGAQIFEALGISKAVVDKYFTGTITRIQGLTLDDIAKEVLVRHRIGYPTREIPLQVLDVGGVYQWKQRGEQHLFNPETIHLLQESTRHKNYQQFKKYAAAVDSQGDKAVTLRSQLDFVKNPAGSIPIEEVEPIESIVKRFATGAMSFGSISYEAHSTLAIAMNRLGAKSNSGEGGEDPMRFELNANGDSERSAIKQVASGRFGVTSYYLTNADEIQIKMAQGAKPGEGGQLPGDKVDEWIGATRHSTPGVGLISPPPHHDIYSIEDLAQLIFDLKNANRKGRVNVKLVSEAGVGTIASGVAKAKADVVLIAGHDGGTGASPISSIRHTGLPWELGLAETHQTLLKNGLRNRIVVQADGQMKTPRDIAIAVLLGAEEWGVATAALVVEGCIMMRKCHKNTCPVGIATQNKTLRERFAGRVDDVVTFFQYMAQGLREIMAELGFRTINEMVGQAHKLKVRDDIGHWKYKNLDLSPILFIEQPRSEDGIYCQTQQNHQLESILDRTLIQLATPALERGEAVKAELPIINTDRSTGTMLSNEICKVYKDQGLPQPMQVKFNGSAGQSFGAFLTKGVYFEVEGDANDYWGKGLSGGTLVLYPNRNATIVPEENIVVGNVCFYGATSGESYIRGLAGERFCVRNSGAKVVVEGIGDHGCEYMTGGVAVILGSTGRNFAAGMSGGVAYVWDKSGDFQSKLNAELVDLDPIEAEDRALLKEMLTKHVQFTGSEVAKAFLANFDASLATMVKVMPRDYKAVLQKRKAQEQQATLAAEAV

SEQ ID NO: 77441 - protein, 489 aa, Vibrio cholerae
MGKATGFLEFGRELPKKIDPAERIKNNKEFVLNQEFGKKINQQASRCMDCGVPFCHNGCPIGNIIPEFNDAVYRDSWEEAWNILSSTNNFPEFTGRVCPAPCETACVLGINQDPITICNIEKTIVERAYQEGYAKPKTPRSRTGKTVAIIGSGPAGLAAAEQLNAAGHSVTVFERDEKVGGLLRFGIPDFKLGMDVIDRKINLMEQAGVKFVVNAHIGVDINAQQLRQEFDAVLLTGGSTVPRDLSIPGRDLKGVYFAMQFLAQNNRRANGMDLKGEEIHAKGKHVVVIGGGDTGSDCVGTSNRHGAASITQVEIMPIPPQKRPVNMPWPQYPMILRTSTSHEEGCERHWNILTKEFIGNEQGEVTGLRIADIVWKDAAPGERPSFDEVVGSERVIPCDMAFLAMGFLHPEPHGVLAQLGIKLDERGNVATQDFATNQKGVFAAGDMRTGQSLVVRCINEGRECARAVDTFLMGNTHLEAKADSLMLSA

SEQ ID NO: 77442 - protein, 1487 aa, Vibrio cholerae
MALYDPSLEKDNCGFGLIAHMEGQASHKLVRTAISALDRMTHRGGIAADGKTGDGCGLLLQKPDSYLRLIAEEQHWKLSKQYAIGMLFLSRDPHKAQLAQQIVNQELAKETLSVAGWRKVPTNPKVLGPIALDSLPDIQQVFISAPAGWRERDVERRLYIARRRIEKQITDDRDFYICSLSTQVLVYKGLCMPADLPRFYLDLADLRMESAICLFHQRFSTNTQPRWPLAQPFRYLAHNGEINTIEGNRQWARARAYKFASPLLPDLQSAAPFVNETGSDSSSLDNMLDLFLAGGMDIFRAMRMLVPPAWQNHPDMDPDLRAFYDFNSKHMEPWDGPAGIVLSDGRYAACNLDRNGLRPARYVITKDKLITLASEVGIWDYAPDEVSEKGRVGPGELLVIDTRKGKIWQSSEIDNDLKSRHPYREWMENNVHKLTPFSQLPDDKVGERSFDADLLKTYQKQFAMSNEEIDQILRVLGDMAQEAVGSMGDDTPMAVLSSKERLISDYFRQKFAQVTNPPIDPLREKHVMSLATSIGQEMNVFCETDGHAHRVTFDSPILLYSDMQQLLTLSDQHYRNTILDINFDPQEKNLKQAVLDLCDKAEQVVREGTVLVVLSDRALTADRLPIPAAMAVGAVQARLVEANLRCDANIIIETGAARDPHHFAVLIGFGATAVYPYLAYETLGKMIDDGALQKSYREVMQNYQYGINKGLYKIMSKMGISTVASYRCSQLFEAVGLHRDVVDLCFKGVTTRIQGANFDDFEQDLFNLSRKAWAKRKPLEHGGLLKYVHGGEYHAYNPDVVGTLQKAVKSGEIMDYREFAQQVNQRPVAMLRDLLRLKTSDKPLPLEHIEPASDLYKRFDSAAMSIGALSPEAHEALATAMNRLGGYSNSGEGGEDPRRFGTERNSRIKQVASGRFGVTPHYLTNADVLQIKVAQGAKPGEGGQLPGHKVTAEIAKLRYSVPGVTLISPPPHHDIYSIEDLAQLIFDLKQINPKALVSVKLVSEPGVGTIATGVAKAYADLITISGYDGGTAASPLTSVKYAGSPWELGLAETQQALVANGLRHKIRLQVDGGLKTGLDVIKGAILGAESFGFGTAPMVAMGCKFLRICHLNNCATGVATQDETLRKDYFKGLPEMVMNYFKGLAEEVRGYLAELGVEKLTDLIGRTDLLEVVEGMTAKQSKLDLSDLLEAPVSPQNLPLYCTEPNTPFDKGALNQKIVEDALAAVENQQSLELYYNVINTDRSIGARLSGEIAKRYGNLGVATSPIKVVLNGTAGQSFGVWNAGGLELYLTGDANDYVGKGMAGGKIVIRPHQGTAFVCNEATIIGNTCLYGATGGKLFAAGKAGERFAVRNSGTIAVIEGAGDNACEYMTGGIVAILGATGVNFGAGMTGGFAYVLDENGDFQGRVNDESVEAVALTDLYIHQEHLRGLIAEHLEETGSAHAERILANFDEWIPKFYLIKPQAADLRTLLGHQSRSAAELRVQAQ

SEQ ID NO: 77443 - protein, 471 aa, Vibrio cholerae
MMSQNVYQFIDVNRVDPAKKPLHIRKIEFVEIYEPFTKQQATAQADRCLDCGNPYCEWKCPVHNYIPQWLKLANEGRILEAADLAHQTNSLPEVCGRVCPQDRLCEGSCTLNADFGAVTIGNIEKYITDTAFEMGWKPDMSNVVWTDKKVAIIGAGPAGLAAADILVRNGVRPVVFDRYPEIGGLLTFGIPSFKLEKGVMENRRRIFSEMGIEFRLNVEVGQDITLQQLLDEYDAVFLGVGTYQYMRAGLANEDAPGVYDALPFLISNTYKVMELNNEAPFIDMAGKNVVVLGGGDTAMDCVRTSIRQGASRVICAYRRDEENMPGSRREVKNAKEEGVEFMFNLQPLGIEVNAQGQVTGVKVVKTALGEPDAAGRRKPEPVAGSEHVLPADAVIMAFGFQPHKMAWLEPFDVELDQWGRIKAPAKQTYQYQTTNPKIFAGGDAVRGSDLVVTAIDEGRKAAEGILDYLGV

SEQ ID NO: 77444 - protein, 231 aa, Vibrio cholerae
MKIGIIGAMQQEVAILKDLIEDVQEVNQAGCTFYSGQIQGVDVVLLQSGIGKVSAALGTALLISQYAPDVVINTGSAGGFDASLNVGDVVISSEVRHHDADVTAFGYEIGQMAGQPAAFKADEKLMTVAEQALAQLPNTHAVRGLICTGDAFVCTAERQQFIRQHFPSVVAVEMEASAIAQTCHQFKVPFVVVRAISDVADKESPLSFEEFLPLAAKSSSAMVLKMVELLK

SEQ ID NO: 77445 - protein, 276 aa, Vibrio cholerae
MLVIRLIACTFLFITPSLLAKPFPAERIISLAPHATEIAYAAGLGDKLVAVSEYSDYPPQALELERVANHQTINIEKILTLKPDLIIAWPAGNPPRELAKLRQLGFTIYDSQTKTLDEIADNIEALSHYSANPEVGQKAAHDFRQRLQDLRTQYASNQPIRYFYQLSEKPIITLAQGHWPSEVFSLCGGVNIFADSEVPYPQVSIEQVLVKQPQVIFTSEHAIANGHMWRAWQAELSAVQNDQVWALNADWLNRPTPRTLDAVEQVCTYLKIAQKQ

SEQ ID NO: 77446 - protein, 323 aa, Vibrio cholerae
MFTLKRTKLNILTTLREQLLTNNVIMPQEFERLEVRGSHAYKVYSIPKRKAGRRTIAHPSSKLKICQRHLNAILNPLLKVHDSSYAYVKGRSIKDNALVHSHSAYVLKMDFQNFFNSITPTILRQCLIQNDILLSVNELEKLEQLIFWNPSKKRNGKLILSVGSPISPLISNAIMYPFDKIINDICTKHGINYTRYADDITFSTNIKNTLNKLPEIVEQLIIQTYAGRIIINKRKTVFSSKKHNRHVTGITLTNDSKISIGRSRKRYISSLVFKYINKNLDIDEINHMKGMLAFAYNIEPIYIHRLSHKYKVNIVEKILRGSN

SEQ ID NO: 77447 - protein, 1076 aa, Vibrio cholerae
MPKRTDIQSILILGAGPIVIGQACEFDYSGAQACKALREEGYRVILVNSNPATIMTDPEMADATYIEPIHWEVVRKIIEKERPDAILPTMGGQTALNCALALEKHGVLAEFGVEMIGATADAIDKAEDRSRFDKAMKSIGLECPRADTAKSMEEAYKVLDMVGFPCIIRPSFTMGGSGGGIAYNREEFEEICTRGLDLSPTNELLIDESLIGWKEYEMEVVRDKNDNCIIVCAIENFDPMGIHTGDSITVAPAQTLTDKEYQIMRNASLAVLREIGVETGGSNVQFGINPKDGRMVIIEMNPRVSRSSALASKATGFPIAKVAAKLAVGFTLDELMNDITGGATPASFEPTIDYVVTKIPRFNFEKFAGANDRLTTQMKSVGEVMAIGRNQQESLQKALRGLEVGAAGLDEKVDLDAPDALTKIRYELKEAGAERIWYIADAFRAGMSVDGVFNLTNIDRWFLVQIEELVKLEAEVKAGGFAGLNQDVLRKMKRKGFSDARLSKLLGVSENEIRRLRDQYNIHPVYKRVDTCAAEFKSDTAYMYSTYDEECEANPTDKDKIMVLGGGPNRIGQGIEFDYCCVHAALALREDGYETIMVNCNPETVSTDYDTSDRLYFEPVTLEDVLAIVRVEKPKGVIVQYGGQTPLKLARALEAAGVPVIGTSPDAIDRAEDRERFQQAVQRLGLKQPDNATVTAIEQAIEKSREIGFPLVVRPSYVLGGRAMEIVYDEQDLRRYFNEAVSVSNESPVLLDRFLDDATEVDVDAICDGERVVIGGIMEHIEQAGVHSGDSACSLPAYTLSQEIQDKMREQVEKLAFELGVRGLMNIQFAVKDNEVYLIEVNPRAARTVPFVSKATGAPLAKIAARVMVGQTLEQQGFTKEIIPPYYSVKEVVLPFNKFPGVDPLLGPEMRSTGEVMGVGATFAEAYAKAELGCGSVYPEGGRALLSVREGDKQRVVDLASKLVKLGYQLDATHGTAVILGEAGINPRLVNKVHEGRPHILDRIKNHEYTYIVNTASGRQAIEDSKVLRRGALAHKVNYTTTLNAAFATCMSHTADAKASVTSVQELHARVKANQA

SEQ ID NO: 77448 - protein, 379 aa, Vibrio cholerae
MSKSALLVLEDGTVFRGVSIGADGISVGEVVFNTSMTGYQEILTDPSYSQQIVTLTYPHIGNTGTNSEDEESTAIHAQGLVIRDLPLIASNFRSEQSLSDYLKSQNIVGIADIDTRKLTRILREKGAQNGCIMAGDNLDEALALAKAKEFPGLKGMDLAKVVSTKEAYAWKQGSWTLEGGLPEAKADSELPYHVVAYDFGAKRNILRMLVDRGCRLTVVPAQTSAEDVLALNPDGVFLSNGPGDPEPCTYAIEATRVFLEKNIPVFGICLGHQILALASGAKTVKMKFGHHGANHPVKDLDRGVVMITSQNHGFAADEATLPDNLRATHKSLFDGSLQGIHRTDKPAFSFQGHPEASPGPHDAAPLFDHFIELIKQFRA

SEQ ID NO: 77449 - protein, 269 aa, Vibrio cholerae
MVRIAIAGAAGRMGRNLVKATHQNPLSELGAGSERPESSLVGVDIGELCGIGKQGIVLVDNLEQAVEQFDVIIDFTAPASTLANLALCEQHGKKLVIGTTGFTDAQRQTIEQAAKKIPIVMAPNYSVGVNLVFKLLEKAAKVMGDYCDIEIIEAHHRHKVDAPSGTAIGMGEAIAHAMGNQLSDVAVYAREGITGERSRNEIGFATIRAGDIIGEHTAMFADIGERVEITHKATDRMTFANGAVKAAIWLAEQPAGFYTMIDVLGLNDL

SEQ ID NO: 77450 - protein, 903 aa, Vibrio cholerae
MITKLLTKVIGSRNDRTLRRLRKIVKEINNYEPAFEALSDEELKAKTVEFRQRIEQGENLDQLLPEAFATVREASKRVFGMRHFDVQLIGGMVLHGGQIAEMRTGEGKTLTATLAAYLNALPGKGVHIVTVNDYLAKRDAETNRPLFEFLGMTVGVNIPNMPQPAKKEAYQADILYGTNNEFGFDYLRDNMAFRPEDRVQRARFFAVVDEVDSILIDEARTPLIISGPAEDSSDLYIRINKLIPLLQKQDKEDSEEYRGDGHFTVDEKSKQVHLTETGQEFVEELLVKNGMMQEGDTLYSPANISLLHHVNAALRAHVLFEKNVDYIVTPDGEVVIVDEHTGRTMPGRRWSDGLHQAVEAKEGVKIQNENQTLASITFQNYFRLYEKLSGMTGTADTEAFEFQQIYGLETVVIPTNKPMVRNDMPDVVYRSEAEKFAAIIEDIKQRVEKGQPVLVGTVSIEKSELLSNALKKAGIKHNVLNAKFHEKEAEIVAEAGKPGAVTIATNMAGRGTDIVLGGSWQAKVEKLDNPTQEQIDAIKAEWKQVHDQVLQAGGLHIIGTERHESRRIDNQLRGRSGRQGDAGSSRFYLSMEDTLLRIFTSDRMAALIQSGMDEGEAIESKMLSRSIEKAQRKVEGRNFDIRKQLLEYDDVANDQRKVVYELRDELMSADDISDMIAQNREDVLNAVMDEYIPPQSLEDMWDIKGLEDRLKNDFDLPLPIQSWLDADNKLYEEALRERIIEQAVEVYKAKEQAVSPAVMRNFEKSVMLQTLDTLWKEHLAAMDHLRQGIHLRGYAQKNPKQEYKRESFELFEDLLESLKSDVITVLSKVRVQQQEEVERMEAQRRAQAEEAARHAQAQHASADDAEQDESNQPMVRDERKVGRNEPCPCGSGKKYKQCHGQIN

SEQ ID NO: 77451 - protein, 305 aa, Vibrio cholerae
MIRQRTLKEIVKTTGVGLHSGRKVTLTLRPAAANTGIIYRRTDVNPPVDFPADPASVRDTMLCTALVNDQGVRISTVEHLNAALAGMGIDNAIIEVDAPEIPIMDGSASPFVYLLQQAGIQTLNAPKRFIRIKKPVRIEDGDKWAEFVPFNGFRMDFEIEFNHPAIDGDDQRLVFDFSSQGFVKEISRARTFGFMRDIEYLQSQNLCLGGSFDCAIVLDDYRILNEEGLRFDNEFVTHKVLDAIGDLYMAGHAIVGEFRAYKSGHGLNNQLLRAVLADQEAWEWATFEEEVGSPVAFAEPNMVLA

SEQ ID NO: 77452 - protein, 398 aa, Vibrio cholerae
MFEPMMEMSDDAVIKVVGVGGGGGNAVEHMVRESIEGVEFMSINTDAQALRKTSVGTVIQIGGNITKGLGAGANPQVGRDAALEDKERIKEFLTGADMVFIAAGMGGGTGTGAAPVIAEVAKELGILTVAVVTKPFSFEGKKRLAFAEQGIEELSKHVDSLITIPNEKLLKVLGRGITLLEAFASANNVLKNAVQGIAELITRPGMINVDFADVRTVMSEMGHAMMGSGVARGEDRAEEAAEMAISSPLLEDIDLAGARGVLVNITAGLDMRLDEFETVGNTVKAFASDNATVVIGTSLDPDMADEIRVTVVATGIGNEKKPDITLVAGGKSKVAPVSAPVTSRVEEKAAQPLHERVEVKTQPAAAPSHSSASQSVAPKPEKESGYLDIPAFLRRQAD

SEQ ID NO: 77453 - protein, 420 aa, Vibrio cholerae
MTKTVDDNIIVGLDIGTATVSALVGEILPDGQINIIGAGSSPSRGMDKGGVNDLESVVKSVQRAIDQAEMMAECKISHVFLSISGRHIASRIEKGMGTISDEEVSQEDMDRAIHTAKSIKIGEEQRILHVIPQEFTIDYQEGIKNPLGLSGVRMEVSVHLITCHNDMARNIIKAVERCGLKVEQLVYSGLAASNAVITEDERELGVCVVDIGAGTMDIAIWTGGALRHTEVFSYAGNAVTSDIAFAFGTPVSDAEEIKVKYGCALSELVSKDDTVNVPSVGGRPSRSLQRQTLSEVIEPRYTELMGLVNQTVDSVQESLRKEGIKHHLAAGVVLTGGAAQIEGLVACAERVFRNQVRVGKPLEVSGLTDYVKEPYHSTAVGLLHYARDSQISDDTEYQEPKRPSMTGWIGRLRNWIQKEF

SEQ ID NO: 77454 - protein, 260 aa, Vibrio cholerae
MINKVLLEGQRITRSPQVKQHACGASFFLVVLLLIGGLLYSTISWMWDEQRLPLSKLVLQGDLHYVSALDVQRVLARLDHIGTFMSQDINVLQESVQSIPWVSHASIRKQWPDTIKVYLTEYQVEALWNANALLDKNGTVFYGDIARVNGEYVKLYGPDGTAPQVLKAWRDYNPKFAQLGLNISSLVLNDRRAWQIILDNGIRLELGKESLEERISRFFLLYKQLGNKAEQVSYIDLRYDTGAAVGWFPEQELTQEKNDD

SEQ ID NO: 77455 - protein, 506 aa, Vibrio cholerae
MLTRWWRKRSSPLPNNENRIMTIKHTQDLAQIRAMVPEMRRVKAIHFIGIGGAGMSGIAEVLLNEGYQISGSDLAANAVTDRLADKGATIFIGHEAHNVAHASVVVVSTAINEQNPEIQAAREKRIPIVRRAEMLAELMRFRHGIAVAGTHGKTTTTALVTQIYSEAGLDPTFVNGGLVKSAGTNARLGSSRILIAEADESDASFLHLQPMVTIVTNIEADHMDTYGGDFENLKQTFIDFLHNLPFYGQAILCIDDPVIRELIPRVSRQVITYGFSEDADVRIENYRQNGQQGQFTVVRKGKANLDITLNIPGRHNALNAAAAIAVATEDDIRDEAILRAMANTQGTGRRFDHLGEFETGNGVAMLVDDYGHHPTEVDVTIKAARNGWAEKRLVMIFQPHRYTRTRDLYDDFANVLEQVDVLIMLDVYAAGEKPIAGADGRSLCRTIRSRGKIDPIFVPDSQTLPSVLANILQDGDLVLTQGAGDVGKVARHLAALELNIGRMQQI

SEQ ID NO: 77456 - protein, 354 aa, Vibrio cholerae
MMNKNKKLMVMAGGTGGHVFPGLAVAKQLQQQGWQIRWLGTADRMEAELVPKHGIEIDFIQVKGLRGQGLMRLLKAPFQIVNAILQARRHLLTYQPDAVLGMGGYVSGPGGIAAWLLGIPVVLHEQNAVAGLTNQWLAKIARRVFQAFPGAFADASVVGNPVRQDVVQLAAPEQRFATRNGAIRILVMGGSQGARILNQTLPAVMAALGEGYEIRHQAGKNSQQDVAEAYAAAGVESAQVTEFIDDVADAYAWADLLICRSGALTVSEVSAAGVGAIFIPFMHKDRQQALNADHLVACGAAKMIEQPELSVEKLTQMVRELDRAQLLSMAQKARQAAKLDADKVVAQAIIAITE

SEQ ID NO: 77457 - protein, 398 aa, Vibrio cholerae
MFLSGSFTKLSHWLRTSSPEALFDRQLVWIAFGLMLIGLVMVTSASFPISSRLTDQPFHFMFRHAIFLLLAFLTSSMVLQVPLDRWMKYSSLLLGISFFLLIVVLVVGKSVNGASRWIPLGLFNLQPAEVAKLSLFIFMSGYLVRKHDEVRQTFFGGFLKPIMVFGTLAVLLLGQPDLGTVIVMLVTLFGMLFIAGAKLSQFLALMVAGVLAVVALIVAEPYRVRRVTSFLDPWEDPFGSGYQLTQSLMAFGRGEWFGQGLGNSIQKLEYLPEAHTDFVFAVLAEELGFIGVVLVLVLIFSLVLKAIFIGKKAFQHDQQFGGYLAFGIGIWFAFQTLVNVGAAAGMVPTKGLTLPLISYGGSSLIIMSVAVSILLRIDHECRLADRHAPEEITVDEQE

SEQ ID NO: 77458 - protein, 467 aa, Vibrio cholerae
MDHLYRFSIDWLSDTQSSLSGLRMSISMDRWQGIQHVVVVGLGITGLSVVNYLRKYHPSVTVQVIDTREAPPGQEQLSSDVALHRSGWNLEWLLNADLVVTNPGIALATPEIQQVLAAGIPVVGDIELFAWHVDTPVIAITGSNGKSTVTDLSGVLANAAGVKAAVGGNIGVPALDLISPDVELYVLELSSFQLETTSSLKLKAAAFLNLSEDHMDRYQGMEDYRQAKLRIFDHAETAVVNADDTQTFPDHAAHLQVVTFGVEQAAQFSLAQHQGREYLFARDEAVMACAELSLVGRHNVANVLTVLALLDSAGVNFRLALDALKSYTGLTHRCQVVADNHGIKWVNDSKATNVASTLAALSGLKIEGQLYLLVGGVGKGADFTPLAPVLATLPVQLCCFGVDGHQFMPLHPSARFYDSMESIIRSIRPQLKSGDMVLLSPACASFDQFKNFMARGDIFAQLARQYA

SEQ ID NO: 77459 - protein, 360 aa, Vibrio cholerae
MIIWLAELLQPYFSFFRLFEYLSFRAIVSILTALGISLWMGPRMIKRLQMLQIGQVVRNEGPESHFSKRGTPTMGGVMILAAITITVLLWADLTNPYVWAVLAVLLGYGAVGFVDDYRKVVRKNTDGLIARWKYFWQSAIALVVAFALYAHGQDTAATQLVVPFFKDVMPQLGLMYIVLTYFVIVGTSNAVNLTDGLDGLAIMPTVLVAAGFAAIAWATGNVNFANYLHIPYIPHSSELVVVCTAMVGAGLGFLWFNTYPAQVFMGDVGALALGGALGTIAVLVRQEFVLVIMGGVFVMETLSVILQVGSYKLRGQRIFRMAPIHHHYELKGWPEPRVIVRFWIISIVLVLIGLATLKVR

SEQ ID NO: 77460 - protein, 453 aa, Vibrio cholerae
MIRVMLSQLSSVLNARLIGEDRAVSAVSTDSRAIPAEALFVALVGERFDAHDFASQAVTGGAVALLVERELDAECSQLVVADTKQALGQLGSWVHAQCQTPTVAITGSCGKTTVKEMVASILSQKGQVLYTQGNFNNDIGVPLTLLRSTTEDDYAVIELGANHVGEIAYTTALVKPDVALVNNVAAAHLEGFGSMDGVKRAKGEIYQGLQAGAVAIVNLDSNGGDYWKAVLADKTVKTFSATDHNADFYPRDVRLNALGIASFTLVTPVGEVGVELGIMGQHNVANALAAAALSLEMGASLAEIGQGLAHLSKVKGRVDMAQLRDDITLIDDSYNASVPAMKAAVELLGSFSAVRWLILGNMAELGDESLALHQQVGEHAAPFGFEFVLTYGKDAKVISDLCQGHHFATHQDMMTFIEQHIEQQQGRTQVLLVKGANSAGMSKIAAALKEKFA

SEQ ID NO: 77461 - protein, 512 aa, Vibrio cholerae
MLLMKTASKTNNSVRRNMNTHSAISELIAPWLELTDPKLAALVITHLELDSRLIKSGDTFVAIQGHAVDGRQFIDKAIAQGANLVLAEADAQHLNGWVEYRAGVPVIYLAELGQHLSELAGRLYGGHHNQLIGVTGTNGKTTITQLIAQWLELLGHKAAVMGTTGNGFLNALEPAANTTGNALQIQATLRDLAERGAQYTALETSSHGLVQGRVKKLHFVAGVFSNLSRDHLDYHGTMEAYAAAKFSLFSEHACQNAIINVDDAVGAQWVKQLPQAIGVSLVTKPNTAQAIWAREVAYAESGITLNFESSWGEGELHAPLIGEFNACNLLLALATLLSLGFEKSALLATAPKLRPVLGRMELFQREQKAKMVVDYAHTPDALEKALRALRVHCAGQLWAIVGCGGDRDRGKRPMMAAIAEQFADRVILTDDNPRSESPQAIVADMVAGLTYPERAHIEHHRFQAASYALQHAGAQDIILLAGKGHEDYQVLANETIHYSDRETAQQLLELQP

SEQ ID NO: 77462 - protein, 580 aa, Vibrio cholerae
MKKKAPAKASRVSPRVTTAEPAPIFIRWRFYLLLFFVLTAFCALVARVAYIQIIEPDNLIKEGDLRSIRAKTLQSARGIISDRNGEALAVSVPVEAVWADPVAIYKEGGLVEKDRWYALADVLGLDRQEMMKKIEDNRSRRFIYLQRQVSPAMAKYIRELKLAGIGLKEESRRYYPAGEVSAHLVGVTGIDGHGLEGVERSFDSTLTGESGKSVTRKDKFGRVVENIALEEREEGKPIQLTIDQRLQAIAFRAVKQAMADYRATSASAVMLDVKTGAVLAMVNAPSYNPNNRNDWQSFKMRNRVITDAFEPGSTVKPFVVLAALANGIADKNTIIDTGDGTMQIGGSRVRDTSKVGKADLTLILKKSSNIGVAKLALEMPLEALLGMYSSVGLGEMSGLDLVGETIGIFPNRRRWSQFEIATLSFGYGLAITPIQLAHAYATLGNHGKYQPIHIIKGDQHGETRQVVDPKYVNQVLEMLETVTQPGGTATRAAVPGYRIAAKSGTSRKAIAGGYSDEYFAYTAGVAPVSDPRISLVVMVNEPQGDSYYGGAVAGPVFSEIMKGALQILNIAPDENRFQNK

SEQ ID NO: 77463 - protein, 316 aa, Vibrio cholerae
MTASFQHISVLLNESIEGLAIKPDGIYIDGTFGRGGHSRTILAQLGPEGRLYSIDRDPQAIAEAQKIDDPRFTIVHGPFSGIAEYAQRYDLVGKVDGVLFDLGVSSPQLDDAERGFSFMKDGPLDMRMDPTSGMPVSAWLAQADLDDITWVIREFGEDKHARRIAKAIVEYRENELNEPLTRTSQLAKLISDAAPKSFKEKKHPATRAFQAFRIYINSELEEIDTALRGASDILAPQGRLSVISFHSLEDRMVKRFMRKESQGPQVPHGIPLTQDQIRALGSAKMKTVGKALKPSDQEVELNPRSRSSVLRVAEKL

SEQ ID NO: 77464 - protein, 475 aa, Vibrio cholerae
MSKEIKAQVVVLGAGPAGYSAAFRCADLGLDTVIIERYNTLGGVCLNVGCIPSKALLHVAKVIEEAKALTEHGIVFGEPKTDIDKVRLWKEKVINQLTGGLAGMAKMRKVNVVNGYGKFTGPNTIEVDGEEGKTVVTFDNAIVAAGSRPIKLPFIPHEDPRIWDSTDALELKEVPGKLLIMGGGIIGLEMATVYHSLGSKIDVVEMFDQLIPAADKDMVKVYTKRIKDKFNLMLETKVTAVEAKEDGIYVSMEGKSAPAQAERYDAVLVAIGRVPNGKLLDAEKAGLEVDERGFIRVDKQMRTNVPHIFAIGDIVGQPMLAHKGVHEGHVAAEVISGKKHYFDPKVIPSIAYTEPEVAWVGKTEKEAKAEGINYEVATFPWAASGRAIASDCADGMTKLIFDKETHRVIGGAIVGTNGGELLGEIGLAIEMGCDAEDIALTIHAHPTLHESVGLAAEVFEGTITDLPNAKAKKKK

SEQ ID NO: 77465 - protein, 635 aa, Vibrio cholerae
MKVGKVMAIEIYVPDIGADEVEVTEILVKVGDKVAEEQSLITVEGDKASMEVPASQAGIVKEIKVVAGDKVSTGSLIMVFEAEGAAAAAPAPAPQAAAPVAAAPAAAALKEVQVPDIGGDEVEVTEIMVKVGDVVAEEQSLITVEGDKASMEVPAPFAGTVKEIKIAAGDKVSTGSLIMVFEVAGAAPLAAPVQAAAPAAAAAPAVAALKEVQVPDIGGDEVTVTEIMVNVGDSISEEQSLITVEGDKASMEVPAPFAGTLKEIKVATGDKVKTGSLIMVFEVAGAAPVAAPVQAAAAPAAAPAQAATPAAAAPATSGEFQENHEYSHASPVVRRLAREFGVNLAKVKGSGRKNRILKEDVQNYVKEALKRLESGAQAAASGKGDGAALGLLPWPKVDFSKFGDTEVQPLSRIKKISGANLHRNWVMIPHVTQWDNADITELEKFRQEQNAMEAKRDTGMKITPLVFIMKAAAKALEAFPAFNSSLSDDGESLILKKYVNIGIAVDTPNGLVVPVFKDVNKKGIYELSKELAEVSKKARGGKLTAADMQGGCFTISSLGGIGGTAFTPIVNAPEVAILGVSKSEMKPVWNGKEFAPRLQLPLSLSYDHRVIDGAEGARFITYLNECLSDIRRLVL

SEQ ID NO: 77466 - protein, 256 aa, Vibrio cholerae
MAYQRIRQPKLSDVIEQELERLIVEGTLSPGQQLPPERELAKQFEVSRPSIREAIQRLEAKRLLTRRQGGGTFVSDRIWQSFSDPLLNLLSSHSETQLDLLEARHALEGICAYFAALRGTEEDFARIQHCVTRIAEAQALNNVDEEAERVMAFLIAITEAAHNVVLLHIVRSLSPLLEQNIRQNFKLLHRRPEAVEKVSKHRANIVDAIVSGQPEKAREMSHSHLAYIEETLLDLTREQTRRERSLRRIQQGNEPQ

SEQ ID NO: 77467 - protein, 584 aa, Vibrio cholerae
MACHSMIEIQRRPEPDLSLLPDHIDPLLRRLYLSRGVSNVAQLEKAAKALHSFKQLHGIDRAVELLFAAIAEQKRIIVVGDFDADGATSSALSVLALRMLGSRNVDYLVPNRFEDGYGLSPEVVDQAIERGAEMIMTVDNGVSSLEGVRYAKQKGLQVVVTDHHLPGQELPEVDAMVNPNLQQCAFPSKALAGVGVAFYLMMALCVHMRQQGWFAAQGMVEPKLMELIDLVALGTVADVVPLDDNNRILVHQGLQRIRAGLARPGIQALIEVAKRDARRLVAADFGFALGPRINAAGRLDDMSFGVELLLCNNIHAARRMASELDGLNQTRKEIEEGMKQEAVAFCERLQLSDDRELPYGLVLFQRDWHQGVIGILASRIKEKYHRPVIAFAEGGDGKLKGSCRSVPGLHMRDALDKIDTQNPGIILKFGGHAMAAGLTIEEQNFERFCRLFDQLVREELDEAALKGIILSDGELKPEEFSLHTAELLRAGGPWGQAFPEPLFDGEFKVLHQKLVGEKHLKLMLEPLYKGFPTNVMIDGIAFNVDLRRWPDASVKTVRLAYKLDINEFRGNQSLQLMIDHLEAK

SEQ ID NO: 77468 - protein, 250 aa, Vibrio cholerae
MSVLRRLTWLAFPLLSMAFNVQANTAPAQLNKAELEQRFAKLGLQVEEIKTSDINGLLEVQTSGGVLFSSPDGEHFIAGTLYALDGNGGYVDVLAKRQAPLNAKKIAALQDSMIEFKAPNEKYAITVFTDITCGYCVRLHSQIKEYNDLGITVRYLAYPRQGPQGQVADQMAAIWCSNDPKAAMHDAKVNRKTITADKDIAQCQKTIAQHYMLGHELGISGTPAIFLPNGEMVGGYLPAPQLLQRLQATQ

SEQ ID NO: 77469 - protein, 302 aa, Vibrio cholerae
MSEALSPDQGLVEQFLDTMWFERGLAENTVASYRNDLSKLLEWMAQNQYRLDFISFAGLQEYQSWLSEQNYKPTSKARMLSAIRRLFQYLHREKVRADDPSALLVSPKLPTRLPKDLSEAQVEALLSAPDPQSPLELRDKAMLELLYATGLRVTELVSLTMENMSLRQGVVRVMGKGGKERLVPMGENAIEWIETFLQQGRSLLLGEQTSDIVFPSSRGQQMTRQTFWHRIKHYAVIAGIDVEKLSPHVLRHAFATHLLNYGADLRVVQMLLGHSDLSTTQIYTHVATERLKQLHNEHHPRA

SEQ ID NO: 77470 - protein, 246 aa, Vibrio cholerae
MTTHQFEHPLNEKTRIYLRVEALLNQMERASTFSDGIQHQLFFRSLFDMLEIFEQIQLKSELAKDMEKQRLTYRSWLHVEGVDQEMLNSLLTEVDEVHRDLMSAERFGQSLKEDRFLSAIRQRFNLPGGSCCFDLPALHYWLHLPLDRKMRDAQQWMQTVTPLSNALKLWLKLTRETGHYRSRMASNGFYQSDAEDANILRLAIPLEYGVYPMISGHKNRFAIKFIDFHSGQACTQDIAFDLAVCC

SEQ ID NO: 77471 - protein, 272 aa, Vibrio cholerae
MKVSSQSEDSSIKLIQITDTHLFAAEDGSLLSVNTADSFAAVVAAIGEEQVEFDAILATGDISQDHTPESYQRFVRGIQPLKKACYWLPGNHDYKPSMHSVLPTQQIQAVEHVLLGEHWQVVLLDSQVVGVPHGKLSEQQLQLLDNKLTEYPERHTLVLLHHHPLLVGSAWLDQHTLKESERFWDVVAKHSNVKAILCGHVHQDMDRIHLGARVMATPSTCVQFKPNSQDFALDNCSPGWRELTLHADGQVSTQVKRLKQGRFLPDFNSNGY

SEQ ID NO: 77472 - protein, 148 aa, Vibrio cholerae
MSQLTVKKPYHVDLPELMRVYETNYAKLNALLPAQPEVGEVRCYQAAQMTYQLQVLEVTKYTTLLEVCQSDDLSVFPLPTMSVRLYHDARVAEVCSSEQLGRVQARYDYPNENMVQPDEKAQLNRFLGDWLTFCLKHGISRSPITLSQ

SEQ ID NO: 77473 - protein, 505 aa, Vibrio cholerae
METEIELKFFVSPDFSTILRAKISETKVLQHSCRELGNTYFDTPDNWLRQHDIGLRIRRFDEVYVQTVKTAGRVVAGLHQRPEFNAEHHSNEPDLSLHPADIWPQGKELTQLQAELMPLFSTNFTREQWLISMADGSQVEVAFDQGLVVAGDRQEPICEVELELKSGQTDALFTLARQLCEHGGMRLGNLSKAARGYRLAANYSGDEIQPMALVSVDKNDTAESCFIRALEHALAHWHYHEQIYTERENVAALHEIRHAVSYLRQLLSVYGGIIPRRASAILRQELKWLEQELQWLKEFEYLESLQEDKGYALRKLDARKFLVTALKTLQESLPQREDTLRLLSSARYTGLLLDLSRWVLTRGWQPFLDDKAREKMAQPLEAFSVKQLDRTWAELMEAFPPGKTLTVQEYLDQQYRLMRNLYTGVSFASLYDAENRQAFRMPWADLLHGIDDLLRLKPLERLVDLLQGEEQDQLKRWLIRQENSILHAMEQSRTMGVEAHPYWRE

SEQ ID NO: 77474 - protein, 433 aa, Vibrio cholerae
MGCSACYQQLGITMEILANYGTVLIIVAAVFGFLMAIGIGANDVANAMGTSVGSKALTVKQAIIIAMIFEFAGAYLAGGEVTETIRNGVIETSLFADKPDVLIYGMMSALLAAGTWLLVASYMGWPVSTTHSIIGAIIGFACVSVGTEAVDWSSVKGIVGSWIITPVISGFFAYLIFVSAQRLIFDTEKPLINAKRFVPVYMFITTMVIALVTIKKGLKHVGLHLSSSEAWMWSAVVSAIVMVGGYLYIQKKFANRDEDHGFAGVESIFSILMVITACAMAFAHGSNDVANAIGPLSAVVSTVEHMGEVAAKSSIAWWILPLGGFGIVVGLATLGHKVMATIGTGITELTPSRGFAAQLATASTVVLASGTGLPISTTQTLVGAVLGVGFARGIAALNLGVVRNIVASWVVTLPAGALLAVVFFYAIQAVFVG

SEQ ID NO: 77475 - protein, 529 aa, Vibrio cholerae
MYLNFFGFDELPFSIVPNARYLYLSQRHQEAIVHLQAGLGDGGGFAMLTGEVGTGKTTVARAILASLPGKTRAGMILNPTFSDLELLEAICDEFEVSYPKKATLKKLTQVLHEFLLAEHAQGIQVLLMIDEAQHLAPDVLEQLRLLTNLETESHKLLKVLLIGQPELQEKLRLPQLRQLAQRITGRYHLLPLNEEQTADYIRFRIEQASGNPELFNRKACQWIAEQTHGIPRLINLVCDAALKQAYQAGEPTLSLARIKLACQEVMSFQSSVYQVASAKPPVPKLSYLSSALGGIALAVVLAWQLPPQLDRVMQHYFPLPEVVPPTEQRVFPQALRSALLNATSSEHALETLYAVWGYQASVLEQFCQTQADAVLWCEEQTGDWSTLQTYDLPAVLTLMMDDVPTYAVLYRLTGDQAELLVGGERYRIARQWLEPLWNGQFSLLWQASFSRTLKQGMQGADVALLESKLAQVLGEPERPREQFDKDLSRKVELFQRWQNMHVDGIAGRQTLRRLELLTQQQAPSLKEEG

SEQ ID NO: 77476 - protein, 403 aa, Vibrio cholerae
MQIYLVGGAVRDQLLQLPVYDRDWVVVGSSPQAMLAAGFQAVGKDFPVFLHPNSKEEHALARTERKTSVGYTGFACHYAPDVTLEEDLLRRDLTINAMAQDNSGQLIDPYGGQRDLAAKVLRHVSPAFVEDPLRVLRVARFAAKLHHLGFTVAEETMQLMAKIAQSGELQHLTAERVWQEWHKSLSAHHPEMFLQVLRDCGALAVVLPEIDRLFGVPQPEKWHPEIDTGIHTLMVAKQAAQLSDSLLVRFAAQVHDLGKGVTPPSEWPRHKLHCHTGLNIIESLCERIRVPNEFRDLALAVCAQHSNIHRADELKPTTKLKVLGLLDVWRKPERLEQVLLCCEADHRGRLGLESEPYPQREIFLRAYQAALGVAVQAVIADGFQGKHIKEELDKRRVSAIEAL

SEQ ID NO: 77477 - protein, 433 aa, Vibrio cholerae
MSKIVKVLGREIIDSRGNPTVEAEVHLEGGFVGMAAAPSGASTGSREALELRDGDKSRFLGKGVLKALAAVNGPIADALVGKDAKDQATIDQIMIDLDGTENKSNFGANAILAVSLANAKAAAAAKGMPLYEHIAELNGTPGVFSMPLPMMNIINGGEHADNNVDIQEFMIQPVGAKTLKEAVRMGAEVFHNLAKVLKSKGYNTAVGDEGGFAPNLKSNAEALEVIAEAVAAAGYKLGTDITLAMDCAASEFYDAEKKEYNLKGEGRIFTSNGFSDFLEELTEKFPIVSIEDGLDESDWEGFAYQTEKLGKKIQIVGDDLFVTNTKILKRGIDNGIANSILIKFNQIGSLTETLAAIKMAKDAGYTAVISHRSGETEDATIADLAVGTAAGQIKTGSMSRSDRVAKYNQLIRIEEALGSRAPFNGLKEVKGQA

SEQ ID NO: 77478 - protein, 545 aa, Vibrio cholerae
MTTNYIFVTGGVVSSLGKGIAAASLAAILEARGLKVTMMKLDPYINVDPGTMSPTQHGEVFVTEDGAETDLDLGHYERFIRTKMTKRNNFTAGRVYADVLRKERRGDYLGATIQVIPHITNAIKDRVIAGSEGHDIAIVEVGGTVGDIESLPFMEAIRQLAIEVGREHAMFMHLTLVPYLAAAGEVKTKPTQHSVKELLSIGIQPDILVCRSDRMIPANERKKIALFCNVPEKAVISMKDVDSIYKIPQLIRSQGLDDLVCARFGINAPEADLSEWEQVIYEEANPTGEVTIGMVGKYTELPDAYKSVNEALKHAGLKNRLSVTIKYVDSQDVETKGTDVLNGLDAILVPGGFGDRGIEGKIRAAQYARENKIPYLGICLGMQVALIEYARNVAGMEGAHSTEFNKNTKYPVVGLITEWVDGEGNVEERSEKSDLGGTMRLGSQLCHLEKGTKAYELYGSATIHERHRHRYEVNNLLRPQIEKAGLKVSGLSADKKLVEVIENPAHPWFVAAQFHPEFTSTPRDGHPLFAGFVKAAGQFQRGELK

SEQ ID NO: 77479 - protein, 278 aa, Vibrio cholerae
MPDVRKAMSHPIEQLEQIMRRLRDPEQGCPWDKEQTFDTIAPYTIEETFEVVDAITQRDWPNLREELGDLLFQVIFYSQMAKEQGLFEFRDVVETVNEKLTRRHPHVFGDATFENDAQIHANWEAEKAKEKAQAGKSEQSILDSVPRSLPALSRAYKIQKKCAQYGFDWDSLGPVVEKVHEEVEEVMEEALQVDVDTQKVEEELGDLLFATVNLVRHLGHDPEMALSKANAKFVRRFQGVEDKARAKNKPLHAFTLAELDGFWDEVKLEEKQAIKSFS

SEQ ID NO: 77480 - protein, 738 aa, Vibrio cholerae
MVAVRSAHLNPDQQFELETWIASLTQEGKTAAKLTAVYRDCEQLLAGNPQGPLLLWRGREMIEILITLSMDRPTLVAALLFPIATSGVLDNESLEEGYGREVVKLIHGVEEMAAIGQLNVTMHGSEASAQVDNVRRMLLAMVDDFRCVVIKLAERICNLREVKNEPDEVRRVAAKECANIYAPLANRLGIGQLKWEIEDYAFRYQQPDTYKQIAKQLSERRIVREQYIRDFVSDLRAEMKQSGINAEVSGRPKHIYSIWRKMQKKSLAFDELFDVRAVRIIADKLQDCYAALGIVHTKYKHLPNEFDDYVANPKPNGYQSIHTVILGPEGKTIEIQIRTKQMHEESELGVAAHWKYKEGSSAARSGYDEKITWLRKLLDWQEEMSDSGEMLDELRSQVFDDRVYAFTPKGDVVDLPMGATPLDFAYHIHSEVGHRCIGAKVAGRIVPFTHKLQMGDQVEIITAKEPNPSRDWLNPSLGFVHSGRARAKINAWFRKQSREKNLEAGREILEIELAKIGANLKHAEAYALKRFNVNSVDEMYVGIGSGDLRINQIVNHINALVNKPTAEEEDKLALEKLQENKTLTPNRPHKDAVVVEGVDNLMTHLARCCQPIPGDEIRGYITQGRGISVHRSDCEQLEELSLHAPERIIDTVWGSGFVGSYLLTVRVEAMERSGLLKDITTLLANEKVKVASMKSRSDYKRQIIIMDFDLEVNNVEALARVSKRIEQIKDVMLVKRLG

SEQ ID NO: 77481 - protein, 126 aa, Vibrio cholerae
MIVGLGTDIAEIERVEKALARSGENFARRILTDSELEQFHASKQQGRFLAKRFAAKEAASKALGTGIAQGVTFHDFTISHDKLGKPLLILSGQAAELASQLQVENIHLSISDERHYAMATVILERR

SEQ ID NO: 77482 - protein, 325 aa, Vibrio cholerae
MADQEFDIDAYFASQSEGKSVVASTPENQHCGFVAIVGRPNVGKSTLLNNLLGQKISITSRKPQTTRHRIMGVETDGNYQAIYVDTPGLHIEEKRAINRLMNRAASSSLSDVNLVLFVVEGTHWTADDEMVFTKLQKANFPVVLCVNKVDQVKDRNEVMLHMLELSKRMQFVDIVPISAKQGKNTDVLKKHVRDHLPKAVHHFPEEYVTDRSQRFMASEIVREKLMRFTGEELPYSVTVEIERFDYNPDTDGFHINALILVERIGQKKMVIGKNGEKIKTIGREARLDMEELFGRKVYLETWVKVKSGWADDERALRSLGYIDDL

SEQ ID NO: 77483 - protein, 298 aa, Vibrio cholerae
MANTFSLILVIVTLVTGIVWTLEKLVWAKKRQQKQAHLQAQTPDMPASALDKVVAQPWWIENSVSIFPVIAFVLVLRSFIYEPFQIPSGSMMPTLLVGDFILVEKYAYGLKDPVWRTQLVETGKPERGDIVVFKYPVNPEIDYIKRVVGMPGDTVRYSAGKELCIQHQGESECQAVKLSNVQESEFYQNEIPLIQLNEQLGKVEHNILVNPLSIDNVANYRPRSGVNEWVVPQGHYFVMGDNRDNSADSRFWGFVPEQNLVGKAVAIWISFEFERAEDSVLPRWIPTGVRFNRVGGIH

SEQ ID NO: 77484 - protein, 86 aa, Vibrio cholerae
MYTAEQKARIKWACRRGMLELDVVIMPFFEECFDSLTESEQDDFVALLESDDPDLFAWVMGHGRCENLGLAAMVDKIVAHNLSKVR

SEQ ID NO: 77485 - protein, 323 aa, Vibrio cholerae
MDWQNRFSVLNLSSHDPLPELMLTHLTGWGAITLVGADKKAYLQGQVTCNVVSLQEQQVTFGAHCDAKGKVWSVFRLFHHHDGYAMFQPQSAMEVELRELKKYAIFSKVTIAESSDIALGVMGSQADAWIDTVSETTGDVRRIAGGTAVRMSPQRWLLLVNAEQAEQYVNAWQGLHVEQSLWTRMDIEEAVPVVTQTAQNEHIPQALNVQAVDGISFTKGCYTGQETVARAKYRGINKRAMYIVKGNLSAPLSQDEPVVLERAVGENWRSAGALLTHYRFTDSIAIGLIVLPNDLEHDVKLRLAAQPDTRWHIQPLPYSLSDE

SEQ ID NO: 77486 - protein, 409 aa, Vibrio cholerae
MMQSVDVVIIGGGMVGLALAAALKESDLRIAVVENQLPEEALNPLPDVRVSALSRSSEIVLRNLNAWAGIEARRAAPYIAMEVWEQDSFARIEFKANEMTQPNLGHIVENRVIQLALFEQVQQQANVTLHVPATCQSIAVGESEAWLTLSNGQALSAKLVVGADGANSWLRRQMDIPLTHWDYGHSALVANVRTSDPHNKVARQIFTAQGPLAFLPMSEPHMSSIVWSTEPSRAEALLNMNDVQFNKALTAEFDARLGRCEVVGERQAFPLKMRYARDFVAPRVALVGDAAHTIHPLAGQGVNLGLLDAACLAQELLSLWQQNRDIGDERNLRHYERWRKAEAAKMIAAMQGFRDLFEGDNPAKKLIRGIGMRLVGQLPGAKDEIMKRALGLKGDLPELAKQVWLERAY

SEQ ID NO: 77487 - protein, 194 aa, Vibrio cholerae
MTDSRTHLRLQIRQRRQSLSAFEQQTASQQLIHTFASLPEVTAAQRIALYLANDGELNTQPLIEWLWQQGKQVYLPVLHPFAKGHLLFLHYHTHTPMNKNRYGIAEPKLDQRLICPVRELDIIGTPLVAFDQSGQRLGMGGGYYDRTLAPWFKTQQGAMPIGLAHDCQQVEQLPTASWDIPLRKIVTPSKVWQW

SEQ ID NO: 77488 - protein, 164 aa, Vibrio cholerae
MRHIISLLLENQPGALSRVVGLFSQRGYNIETLNVSPTDDETLSRLNITTKTDEMQLEQIQKQLHKLIDVLKVQEVTECEHIERELMLVKVKASGFARAEVKRTADIFRGQIVDVTASQYTVQLAGTSEKLDAFIEAIAEVTEVIEVARSGVVGIARGERALRA

SEQ ID NO: 77489 - protein, 573 aa, Vibrio cholerae
MEMLSGAEMIVQSLINEGVEQIFGYPGGSVLDIYDALHEKTDQIKHVLVRHEQAATHMADGYARATGKPGVVLVCSGPGATNTVTGIATAYMDSIPMIVISGNVATNLIGNDAFQECDIVGVSRPIVKHSFLVKKAEDIPETIKKAFYIASTGRPGPVVIDVPKDVMSPLNKLPYEYPETIKMRSYNPTTAGHKGQIKKGLRALLDAKKPVLYVGGGAIIANADQQIRQLAEALNLPVVSTLMGLGVFPGTHKNSLGMLGMHGVYEANMAMHNADLIFGVGVRFDDRTTNNLEKYCPNAKIMHIDIDPSSISKNVKVDLPIVGSADQVLDGMLKLLEESAERNDAAALDSWWNEIQVWRDRQCLAYETSAERIKPQQVIETLYKITEGKAILASDVGQHQMFAALYYPFDKPRQWINSGGLGTMGFGLPAGMGVKFAMPEEEVLVVTGDGSIQMNIQELSTALQYDIPVKIINLNNRFLGMVKQWQDIIYQGRHSNSYMSSVPDFAAIAEAYGHVGIRISHPDELQAGLEKALAMKDRLVFVDINVDETEHVYPMQIKGEGMDKMWLSKTERT

SEQ ID NO: 77490 - protein, 178 aa, Vibrio cholerae
MMRAMEPIAKLDLAFSLLCLQHKYNTRVARLSKSISHTGDGHLYALMGILAWWLDETHGLLFLAVGLLAFAIELPIYWLLKNSFQRRRPQELSALVTAYITPSDRYSLPSGHTAAAFVMATLIGYIYPHWYAVALCWAGLIGLARVLLGVHFLSDVIAGALLGMGSATYAMSVMEKSI

SEQ ID NO: 77491 - protein, 467 aa, Vibrio cholerae
MSKAKTLYEKIYDAHVVVAAPGETPILYIDRHLVHEVTSPQAFDGLREKGRPVRQVSKTFATMDHNVSTTTKDINASGEMARIQMQTLSKNCEEFGVTLYDINHKYQGIVHVMGPELGITLPGMTIVCGDSHTATHGAFGSLAFGIGTSEVEHVLATQTLKQGRAKTMKIEVRGKVAPGITAKDIVLAIIGKTTAAGGTGYVVEFCGEAIRDLSMEGRMTVCNMAIELGAKAGLIAPDATTFNYIKGRKFAPQGSDWDAAVDYWQTLKTDEDAQFDAVVTLEASEIKPQVTWGTNPGQVIAVDEPIPSPSQFADPVERSSAEKALAYMGLEAGKMLSDYKVDKVFVGSCTNSRIEDMRAAAAVAKGKKVASHVQALIVPGSEQVKAQAEAEGLDKIFIEAGFEWRLPGCSMCLAMNNDRLGPGERCASTSNRNFEGRQGRDGRTHLVSPAMAAAAAIAGHFVDIRQF

SEQ ID NO: 77492 - protein, 503 aa, Vibrio cholerae
MEFSVKSGSPEKQRSACIVVGVFEPRRLSPVAEQLDKISDGYISSLLRRGDLEGKPGQMLLLHQVPGVLSERVLLVGCGKERELGERQYKEIIQKTINTLNETGSMEAVCFLTELHVKGRDTYWKVRQAVEATKDGLYIFDQFKSVKPEIRRPLRKLVFNVPTRRELNLGERAITHGLAISSGVKACKDLGNMPPNIANPAYLASQARRLADDYESITTKIIGEEEMEKLGMASYLAVGRGSRNESMMSVIEYKGNPDPEAKPIVLVGKGLTFDSGGISLKPGEGMDEMKYDMCGAASVFGTMKAIAKLGLPLNVIGVLAGCENMPGSNAYRPGDILTTMSGQTVEVLNTDAEGRLVLCDVLTYVERFEPECVVDVATLTGACVIALGHHISAVMSNHNPLAHELVNASEQSSDRAWRLPLADEYHEQLKSPFADMANIGGRPGGAITAACFLSKFAKKYNWAHLDIAGTAWKSGAAKGSTGRPVSLLVQFLLNRSGGLDAEE

SEQ ID NO: 77493 - protein, 149 aa, Vibrio cholerae
MPTATFYLISRDSAQATPEGLAQYVLYLTRHFAAQGARIYLQCQDKPHAEQLAERFWQIEPEQFLAHNLVGEGPKSGTAIEIGYVGVSPSWNRQLAINLADNQTTFARTFTEVVDFVPCAENAKQLARERYKLYRQAGYQLQTVEIQYP

SEQ ID NO: 77494 - protein, 953 aa, Vibrio cholerae
MEKTYNPTSIEQDLYKTWEEQGYFKPHGDTSKDAYSIMIPPPNVTGSLHMGHAFQDTIMDTLIRCQRMKGKNTLWQVGTDHAGIATQMVVERKIAAEEGKTKHDYGRDAFIDKIWEWKAESGGTITKQLRRLGASVDWDRERFTMDDGFYKAVQEVFVRLYKDDLIYRGKRLVNWDPKLHTAISDLEVENKETKGHMWHFRYPLADGVKTADGKDYIVVATTRPETMLGDTGVAVNPEDPRYKDLIGKEIILPIVGRRIPIVGDEHADMEKGTGCVKITPAHDFNDYEVGKRHQLPMINILTFDANIRDAAEVFNSNGEASNAYGTEIPAKYQGMERFAARKAIVAEFEELGLLQEIKDHDLTVPYGDRGGVVIEPMLTDQWYVRAGILAKPAVEAVENGDIQFVPKQYENMYFSWMRDIQDWCISRQLWWGHRIPAWYDEQGNVFVGRNEEEVRAENNIAADVALRQDDDVLDTWFSSALWTFGTLGWPEKTPELKVFHPTDVLVTGFDIIFFWVARMIMMTMHFCKDEDGKAQVPFKTVYVTGLIRDENGDKMSKSKGNVLDPIDMIDGIDLESLVAKRTGNMMQPQLAAKIEKNTRKTFENGIEAYGTDSLRFTLAAMASTGRDINWDMKRLEGYRNFCNKLWNASRYVLMNTEEQDCGFAAGAELEYSLADKWIESQFELAAKEFNGHIDNFRLDMAANTLYEFIWNQFCDWYLELTKPVLWKGTEAQQRATRRTLITVLEKTLRLAHPVIPYITETIWQSVKPLVDGVEGDTIMLQALPQYDVANFNQEALDDIEWVKAFITSIRNLRAEYDINPGKPLEVMLKAANEQDAARIEANKPVLVSLAKLESIRVLADGEATPACATALVGKSELMIPMAGLIDKDAELDRLAKEIAKTQGEIARIEGKLGNEGFVAKAPEAVITKEREKLAGYQEALVKLEQQKATIAAL

SEQ ID NO: 77495 - protein, 334 aa, Vibrio cholerae
MAFNLRNRNFLKLLDFTPKEIHFLLDLSAELKRAKYAGTEQKTLQGKNIALIFEKSSTRTRCAFEVAAFDQGAQVSYIGPSGSQIGHKESMKDTARVLGRMYDGIQYRGFGQEIVEVLGQYAGVPVWNGLTDEFHPTQILADLLTMQEYGRSKQLHEMKFAYLGDARNNMGNSLMVGAAKMGMDIRLVAPKAYWPNDALVATCQEIAKQTGAKITLTEEVQEGVKGCDFLYTDVWVSMGEAADAWDERVALMKPYQVNMDVIKATGNPQVKFMHCLPAFHDDQTKVGQEIAAKYGMQGLEVTEEVFESEYSIVFDEAENRLHTIKAVMVATLGQ

SEQ ID NO: 77496 - protein, 419 aa, Vibrio cholerae
MEKFRVIGSTQPLQGEVTISGAKNAALPILFASILAEEPVEVANVPHLRDIDTTMELLERLGAKVERNGSVHVDAGPINQYCAPYDLVKTMRASIWALGPLVARFGQGQVSLPGGCAIGARPVDLHIHGLEQLGATITLEDGYVKAHVDGRLQGAHIVMDKVSVGATITIMCAATLAEGTTVLDNAAREPEIVDTAMFLNKLGAKISGAGTDSITIEGVERLGGGKHAVVPDRIETGTFLVAAAVSRGKIVCRNTHAHLLEAVLAKLEEAGAEIECGEDWISLDMTGRELKAVTVRTAPHPGFPTDMQAQFTLLNMMAKGGGVITETIFENRFMHVPELKRMGAKAEIEGNTVICGDVDRLSGAQVMATDLRASASLVIAGCIAKGETIVDRIYHIDRGYERIEDKLSALGANIERFRD

SEQ ID NO: 77497 - protein, 241 aa, Vibrio cholerae
MAILKAQHLAKSYKKRKVVSDVSLQVESGQIVGLLGPNGAGKTTSFYMIVGLVARDEGTITIDDNDISILPMHSRSRMGIGYLPQEASIFRKLSVEDNIMAVLQTREELTHEERQDKLEDLLEEFHIQHIRKSAGMALSGGERRRVEIARALAANPQFILLDEPFAGVDPISVIDIKKIIEHLRDRGLGVLITDHNVRETLDVCEKAYIVSQGRLIAEGTPQDVLNNEQVKQVYLGEQFRL

SEQ ID NO: 77498 - protein, 286 aa, Vibrio cholerae
MRLIVVSGQSGAGKSVALRVLEDLGYYCVDNLPVSLLTAFIQSVQGSQQNVAVSIDIRNLPKEPSLVQDVLDQLKQNNDVSMLFLDASKETLLKRYSETRRIHPLSLSQSKPSLAQAIELEKQLLGPLKEQADLLLDSSNQSLHELSETVRMRIEGRERKDLVMVFQSFGFKYGLPTDADYVFDVRFLPNPHWEPDLRPLTGLDAPIKSFLEGHSEVMELKQQIQKFFEYWLPMLEKNNRSYLTIAIGCTGGKHRSVYLTQQLGEYFAQLGHQVQLRHTSLEKQQS

SEQ ID NO: 77499 - protein, 453 aa, Vibrio cholerae
MAEQIEFDQAHLTLQEITEALDNGRFVHVRRQLQDMEPEDIAHLLEASPRKAREVLWQLTDPEDYGEILDELNEDVKDALVSKMAPEKLAEATEGMDIDDVAYVLRSLPDDVSREVLSQMDAADRMRVETALSYPEDTAGGLMNTDVITIRADVDVDVVLRYLRMKGELPEATDALYVIDDESKLIGHLSLVTLLTTQPDVPVSEVMDDADEAIKVDMKDSDIANLFERRNWVSAPVVDENQHLVGRITIDDVVDIIREDAEHSMMSMAGMDDDEDTFAPVVKSARKRSIWLGANVLAALAAASVSNMFEATLEQMAAVAVLMTIVPSMGGVAGNQTVALVIRGLALGHIGDSNKRELLMKEAAIGLLNGITWALIIGAIVVVWKGEWMLGGIISAAMMTNLIVAGIAGVSIPILLKKMNIDPALAGGMALTTVTDVIGLSVFLGLATLLLAS

SEQ ID NO: 77500 - protein, 193 aa, Vibrio cholerae
MMKNMARKNQKAPWEEEEEIIWVSRTELKNDMLALQKLGEELVELKPSALAKFPLPEDLAEAIKDAQRFKNEARRRQLQYIGKLMRHIDPEPLQAALDKLRNKHSQTTALLHKLEQLRDRIVAEGDSAIEVAMEQYPEADRQRLRLLARQASKEKAGNKPPKSSREIFQLLKEAMLAKQEIEEESEDDLDSAE

SEQ ID NO: 77501 - protein, 330 aa, Vibrio cholerae
MKFQLTAVALATLCVASAASAAPTLTVYTYDSFAAEWGPAPAIEKAFEAQCGCDLQFVALDDGVSILNRLRLEGSNSKADVVLGLDNNLIEEAKQTGLLATHSVDTSKVTLPNGWSDNTFVPYDYGYFAFVYNKEKLANPPTSLKELVEKRDDLKVIYQDPRTSTPGQGLLLWMKSVYGDQAPQAWKQLASKTVTVTKGWSEAYSMFLGGEADLVLSYTTSPAYHLIAENDARFATANFSEGHYLQVEVAAKVKSTKNGELADKFLQFILSNEFQSVIPTGNWMYPVTAVELPKGFDTLAVPTQSLSFSAQEVAQMRKPWIREWQQALSF

SEQ ID NO: 77502 - protein, 1254 aa, Vibrio cholerae
MIKRALKWTKWLSMSLLVLVILLVLALAGALFTNPGLHVVLWGAQQALPQLKVEQAQGALFPRFTLQGVNYADSELNLSFSVQKLSLAINPNCLLEPSICINELALSGVKLDLPSLAESEPAPDEPDSEPLGDISTPIPIRLGQLALQDIELNILGNRVAWQQLTTRASWQGNRLRIGQTEWQGIRLALAESEASTEPEAAQAATSDSAEPLQLPDVMIPLHIELARFDIRDFRLEQETPIIVNHLALQATAAQHDVSISSLELSMPELDAQLNAQATLSQDYPIQLELRSQVHLADFKGQTLSLAAQGSLADLTVQANLDSLAQAQLNSHFNLLDADIPFDLQLSQVKAQWPMLGEGDYHVEVPELSIQGSLAKYQFALQGALQGKDLPNVSLALQGHGNLDEVALQSLKVDTLGGLVTGNAVANWKNPLNWAARLNLKNIQPGLQWPEAEGKISGELDTSGALTEQGGWQVEVSRLAIKGVLRDYPLKMLGELSASDVQGQGDITLQTKGVSLVHGPNSLTAKGQLSKQWRMSVELDVPDLSKSLPDAKGKVIGDVLLRGDLKQPRVKLVLDADSLQWQELGSIGHVTLQGNLVPLPEPQGELTLQVRAIQYQDQRIDTVDLKAQGSQRKHEVTLDVTSDLASTSLAMNGRLRTEPTLRWQGELERMWLNSPQGQWLLQQATALSFDQRTERVTVAAHCWVQGEASLCLEEEAELGARGETRLAIKQFDFKQLAGVLPKETKLSGGLNGQVWAKWAPKAAPQLQANLELTQGQVTQKLNKSVTFGWDKAQFSAQLAKNQLQASWLLDATDNGDLSGNIQIADVRAEQKTMLGSLNLTTFNLDFLQPLIGELSEAKSNINADVQFHGPMLHPQLNGEIAINDIRVKGEISPVDVQSGQVSLKFNGYQAVLNADIQTTDGLLEVDGDADWQQIEDWRLKARVHAPSMMVELPPMVRVKVIPDLTLTMQPQLARVTGNIALPWGRIVVEELPPSAIGVSKDQILLNADFEPLTDKERIPFSVESDVNVQIGDDFQLSAFGLQGNLVGRLNVAQKDKGPFILGEVNIRNGQYRSFGQDLQIKEGKILMNGPVDQPYLAITAIRNPNNTQDGVVAGVRVSGPSDEPSLTIFSEPAMPQANALSYLLRGQNIDGEAGGNAMTTTLIGLSLAQSGKLVGEIGQAFGVQDLQLDTAGSGDDSQVTVSGYILPGLQVKYGVGIFNSVGEFTVRYRLMQDLYLEAVSGVDSAVDLLYQFEFN

SEQ ID NO: 77503 - protein, 215 aa, Vibrio cholerae
MSKQADSLGFEQDAKPENVVWHRHAVDKAQRATLKQQRPAVLWFTGLSGAGKSTVAGALENRLAALGYHTYLLDGDNVRHGLCSDLGFSEQDRRENIRRIGELAKLMSDAGLIVLTAFISPHRAERQMVRDLLPNGEFLEVYVNTSLDVCEARDPKGLYKKARAGEIRQFTGIDSAYEAPLNPDIDLPAGEKSVDELVAQCLQALAERHIIQRWV

SEQ ID NO: 77504 - protein, 299 aa, Vibrio cholerae
MPATDQLRIKIMAQDAVTPLRKTPRLAVVEGSGYVRAARSQLQAGEVALVGAGPGDPELLTVKALSYLQQADVVLYDYLVSDEIMALIPSETILVCVGKRAGHHSVPQEKTNQLLVDFARQGYRVVRIKGGDPFMFGRGGEELEVLFEAGVKFQVVPGITAAAGATAYAGIPLTHRDYAQSALFVTGHLKAQAEDLDWSTLARGKQTLVIYMGLSNAAAIAEQLQLHGRQASTPVAIIERGTQVNQQVLIGTLQTLPSLASQAQSPALIVVGEVVALAAKLHWFGEQGATQQLDAAQSA

SEQ ID NO: 77505 - protein, 460 aa, Vibrio cholerae
MNANSFAALNLKPELLANLETMGFATMTPIQAQSLPAILKGQDVIGQGKTGSGKTAAFGLGVLSNLNVKRFRVQALVLCPTRELADQVATDIRTLGRAIHNIKVLTLCGGMPMGPQIGSLEHGAHILVGTPGRILDHLSKDRIDLSELNTLVLDEADRMLEMGFQEALEAIIAAAPAERQTLLFSATYPASIEQIAQSVTRNALMIKVEATHDTSSIRQYFYKVEGSAARDEALETLLLHHQPTSSVVFCNTKREVQNVADALHQSGFSVIELHGDMEQRERDQALVQFANKSISILVATDVAARGLDVDNLDAVFNYDLSRDPEVHVHRIGRTGRAGSKGLAFSFFSDNESYRVAQIDEYMDIAIEPSTLPQPAAGARPYAANMVTIQIDGGKKDKVRPGDILGALTSDGELTAEHIGKINLFPMRAYVAVHKKIATKALNKIANGKMKGRQFRARLLK

SEQ ID NO: 77506 - protein, 160 aa, Vibrio cholerae
MIMHYRFTALLISTLASTSALAFPDLKSLGSNDLAGLVGETLSQSKATQELLTQFTSQFPLSPQQAGGGVATLLAQAQNNLNADQKSELLQLIPNLNDLNGLIPNQNLSTILQRKEVNQAFNTLGLDASMVEQFVPVLMQYLTQQGASQDLLASLGKLWQ

SEQ ID NO: 77507 - protein, 128 aa, Vibrio cholerae
MRHRKSGRQLNRNSSHRKAMFSNMASSLVRHEVIKTTLPKAKELRRVVEPLITLAKTDSVANRRLAFARTRDNEVVAKLFNELGPRFAARQGGYTRILKCGFRAGDKAPMAYIELVDRPEAAVEAAAE

SEQ ID NO: 77508 - protein, 330 aa, Vibrio cholerae
MQGSVTEFLKPRLVDIEQISTTHAKVTLEPLERGFGHTLGNALRRILLSSMPGCAVTEVEIEGVLHEYSTKEGVQEDILEILLNLKGLAVRVAEGKDEVFITLNKSGSGPVVAGDITHDGDVEIVNPEHVICHLTSDNAAIAMRIKVERGRGYVPASARIHTEEDERPIGRLLVDATFSPVDKIAYSVEAARVEQRTDLDKLVIDMETNGTLEPEEAIRRAATILAEQLDAFVDLRDVRVPEEKEEKPEFDPILLRPVDDLELTVRSANCLKAEAIHYIGDLVQRTEVELLKTPNLGKKSLTEIKDVLASRGLSLGMRLENWPPASIAED

SEQ ID NO: 77509 - protein, 206 aa, Vibrio cholerae
MARYLGPKLKLSRREGTDLFLKSGVRAIDTKCKIDNAPGVHGARRGRLSEYGVQLREKQKVRRIYGVLEKQFRNYYKEAARLKGNTGENLLQLLEGRLDNVVYRMGFGATRAEARQLVSHKAILVNGKVVNVPSFNVAANDVVAVREKAKKQSRIKAALEVAEQREKPTWIEVDVNTMEGTFKRMPERSDLSADINEQLIVELYSK

SEQ ID NO: 77510 - protein, 129 aa, Vibrio cholerae
MAKQPTRARKRVRKQVADGVAHIHASFNNTIVTITDRQGNALAWATAGGSGFRGSRKSTPFAAQVAAERCAEMAKEYGLKNLEVMVKGPGPGRESTVRALNAAGFRITNIVDATPIPHNGCRPPKKRRV

SEQ ID NO: 77511 - protein, 118 aa, Vibrio cholerae
MARIAGINIPDHKHAVIALTAIYGIGKTRSKAILADLGIAESVKISELTEEQIDQLRDGVAKYTVEGDLRREVSMNIKRLMDLGCYRGLRHRRSLPLRGQRTKTNARTRKGPRKPIKK

SEQ ID NO: 77512 - protein, 37 aa, Vibrio cholerae
MKVRASVKKICRNCKVIKRNGVVRVICSEPKHKQRQG

SEQ ID NO: 77513 - protein, 444 aa, Vibrio cholerae
MARKPGQDFRSAQSGLSELKSRLFFVIGALLVFRAGSFVPIPGIDAAVLAELFEQQKGTIVEMFNMFSGGALERASILALGIMPYISASIVVQLLTVVHPALAELKKEGEAGRRKISQYTRYGTLVLATFQAIGIATGLPNMVNNLVVIDQTMFTLIATVSLVTGTMFLMWLGEQITERGIGNGISILIFAGIVAGLPKAIGQTIEQARQGELHVLLLLLIAVLAFAVIYFVVFMERGQRRIVVNYAKRQQGRKVFAAQSTHLPLKINMAGVIPAIFASSIILFPGTLAQWFGQNGESSTFGWLTDVSLALSPGQPLYVMLYAAAIIFFCFFYTALVFNPRETADNLKKSGAFVPGIRPGEQTAKYIDKVMTRLTLAGALYITFICLIPEFMMVAWNVRFYFGGTSLLIVVVVIMDFMAQVQTHLMSHQYESVLKKANLKGYGR

SEQ ID NO: 77514 - protein, 144 aa, Vibrio cholerae
MLLNTLSPAAGSKHAPKRLGRGVGSGLGKTGGRGHKGQKSRSGGKVRPGFEGGQMPLKQRLPKFGFTSRKSFVSAEVRLSELAKVTGDVVDLNALKAANLVTKNIEFAKIVLSGEINKAVTVKGLRVTKGAKAAIEAAGGKIEE

SEQ ID NO: 77515 - protein, 58 aa, Vibrio cholerae
MATIKVTQTKSSIGRLPKHKATLRGLGLRKINHTVELEDTPCVRGMINKVYYMVKVEE

SEQ ID NO: 77516 - protein, 167 aa, Vibrio cholerae
MAKEQQVQANDLQEKLIAVNRVSKTVKGGRIMSFTALTVVGDGNGRVGFGYGKAREVPAAIQKAMEKARRSMVTIALNEGTLHHPVKGRHSGSKVYMQPAAEGTGVIAGGAMRAVLEVAGVHNVLSKAYGSTNPINIVRATIDALVDVKSPEMVAAKRGLTVEAISE

SEQ ID NO: 77517 - protein, 117 aa, Vibrio cholerae
MDKKASRIRRATRARRKIAELGATRLVVHRTPRHVYAQVIAANGSEVIAAASTVEKAIREQVKYTGNIDAAKAVGKAVAERALEKGVTVVAFDRSGFQYHGRVAALADSAREAGLKF

SEQ ID NO: 77518 - protein, 177 aa, Vibrio cholerae
MSRVAKAPVAIPAGVEVKLNGQEITIKGAKGELTRVFHNGVVIAQEDNQLTFGPREGVANAWAQAGTARALVKNMVVGVTEGFTKKLVLKGVGYRAAMKGNAVGLTLGFSHPVEHELPAGVKAECPSQTEIVLTGCDKQVVGQVAADIRSYRAPEPYKGKGIRYADENVRSKEAKKK

SEQ ID NO: 77519 - protein, 130 aa, Vibrio cholerae
MSMQDPISDMLTRIRNGQAANKVAVKMPSSKLKVAIAALLKAEGYIADFAVEGEVKAELEITLKYFQAKPVIEQIKRVSRPGLRVYKKKDELPSVMGGLGVAVVSTSKGLMSDRAARKAGLGGEIICYVA

SEQ ID NO: 77520 - protein, 101 aa, Vibrio cholerae
MAKQSMKAREEKRAKLVAQFAEKRATLKAIISDVNASEEDRWNAVLKLQSLPRDSSRSRQRNRCNQTGRPHGFLRKFGLSRIKVREACMKGEIPGLRKASW

SEQ ID NO: 77521 - protein, 179 aa, Vibrio cholerae
MAKLHDYYKSSVVAELTKQFSYTSVMQVPRIEKITLNMGVGEAINDKKLLENAASDMAIISGQKPLITKARKSVAGFKIREGYPIGCKVTLRGERMWDFLERLISIALPRVRDFRGVNGKSFDGRGNYSMGVREQIIFPEIDYDKVDRVRGLDITITTTAGTDEEGRALLAAFNFPFRK

SEQ ID NO: 77522 - protein, 105 aa, Vibrio cholerae
MAAKIRQNDEVIVLAGKDKGKKGKVTKVLATGKVIVEGINLVKKHQKPVPAMGVQGGIVEQEAAIDVSNIAIFNAKTGKADRIGFRFEDGKKVRFFKSNNEIVSN

SEQ ID NO: 77523 - protein, 123 aa, Vibrio cholerae
MIQMQTMLDAADNSGARSVMCIKVLGGSHRRYAHVGDIIKVTVKEAIPRGKVKKGDVLKAVVVRTRKGVRRPDGSVIRFDRNACVLLNNNSEQPIGTRIFGPVTRELRNAKFMKIVSLAPEVL

SEQ ID NO: 77524 - protein, 84 aa, Vibrio cholerae
MSDKIRTQLGRVVSDKMDKSIVVAIERMVKHPIYGKFVKRTTKVHAHDENNECGIGDTVEIRECRPLSKTKSWTLVKIVEKAKM

SEQ ID NO: 77525 - protein, 63 aa, Vibrio cholerae
MKAQDLREKSVEELNSELLNLLKEQFNLRMQAATGQLQQTHTLKAVRRDIARVKTVLTEKAGA

SEQ ID NO: 77526 - protein, 136 aa, Vibrio cholerae
MLQPKRTKFRKVQTGRNRGLAKGTEVSFGTFGLKAVGRGRLTARQIEAARRAMTRHIKRQGKIWIRVFPDKPITEKPLEVRQGKGKGNVEYWVAQIQPGKVMYEVDGVPEELAREAFRLAARKLPFKTTFVTKQVM

SEQ ID NO: 77527 - protein, 233 aa, Vibrio cholerae
MGQKVHPNGIRLGIVKPWNATWFANTKDFADNLDGDFKVRQYLSKELANASLSRIVIERPAKSIRVTIHTARPGVVIGKKGEDVEKLRAAVAKIAGVPAQINIAEVRKPELDGQLVADSIASQLERRVMFRRAMKRAVQNAMRLGAKGIKVEVSGRLGGAEIARSEWYREGRVPLHTLRADIDYATSSAHTTYGVIGVKVWIFKGEILGGMPAATEAAEPKADKPKKQRKGRK

SEQ ID NO: 77528 - protein, 110 aa, Vibrio cholerae
MEAIAKHNFARISPQKARLVADQIRGKSVDQALELLTFSNKKAAELVKKVLESAIANAEHNEGADIDDLRVAKIFVDEGPVMKRIMPRAKGRADRILKRSSHITVVVADR

SEQ ID NO: 77529 - protein, 92 aa, Vibrio cholerae
MPRSLKKGPFIDLHLLKKVEKAVESGDKKPIKTWSRRSMIIPTMIGLTIAVHNGRQHVPVFVTDEMIGHKLGEFAPTRTYRGHAADKKAKKK

SEQ ID NO: 77530 - protein, 274 aa, Vibrio cholerae
MAIVKCKPTSAGRRHVVKVVNADLHKGKPYAPLLEKNSKNGGRNNNGRITVRHIGGGHKQHYRLVDFKRTKDGIPAKVERLEYDPNRSANIALVLYADGERRYIIAPKGLQAGDVIQSGPDAPIKAGNAMPMRNIPVGSTIHNVELTPGKGAQLARSAGAYAQLVARDGAYVTLRLRSGEMRKVLSEGRATIGEVGNAEHMLRELGKAGAARWRGVRPTVRGVVMNPVDHPHGGGEGRTSGGRHPVSPWGVPTKGYKTRSNKRTDKYIVRRRNK

SEQ ID NO: 77531 - protein, 100 aa, Vibrio cholerae
MIREERLLKVLRAPHISEKATMSAEKSNTIVFKVAKDATKKEIKAAVEKLFEVEVKSVNTLIIKGKTKRQGLRQGRRSDVKKAYVTLNEGQDLDFVGGAE

SEQ ID NO: 77532 - protein, 200 aa, Vibrio cholerae
MELMVKGANALTVSETTFGREFNEALVHQVVVAYAAGARQGTRAQKTRSEVSGGGAKPWRQKGTGRARAGTIRSPIWRTGGVTFAAKPQDHSQKVNKKMYRGAMKSILSELVRQERLIVVENFSVEAPKTKALVAKLKELELNDVLIVTGEVDENLFLAARNLYKVDVRDVTGIDPVSLIAFDKVLMTAAAVKQVEEMLA

SEQ ID NO: 77533 - protein, 209 aa, Vibrio cholerae
MIGLIGRKVGMTRVFTEDGVSIPVTVVEVEANRVSQVKTLETDGYAAIQVTTGSKKANRVTKPEAGHFAKAGVEAGRGLWEFRLENGEEFAVGSELTVELFNEVKKVDVTGTSKGKGFQGAVKRWNFRTQDMTHGNSLSHRAPGSIGQCQTPGRVFKGKKMAGHMGAERVTTQNLEIVRVDAERNLLLIKGAVPGATGGNVIVKPAVKA

SEQ ID NO: 77534 - protein, 103 aa, Vibrio cholerae
MQNQRIRIRLKAFDYKLIDASTAEIVETAKRTGAQVRGPIPLPTRKERFTVLISPHVNKDARDQYEIRTHKRLIDIVEPTDKTVDALMRLDLAAGVDVQISLG

SEQ ID NO: 77535 - protein, 432 aa, Vibrio cholerae
MGNNVVVLGTQWGDEGKGKIVDLLTEDAKYVVRYQGGHNAGHTLVIDGQKTVLHLIPSGILRNNVKCIIGNGVVLSPEALIKEMSGLEDRGVPVRERLFISEACPLILPYHVALDQAREAARGKKAIGTTGRGIGPAYEDKVARRGLRVGDLFDMASFAEKLQEVMAFHNFQLEHFYKVEPVSYEAVLEQAKGYAELLTSMVIDVTNELDAARKRGDKIMFEGAQGTLLDIDHGTYPYVTSSNTTAGGVAAGSGFGPRHLGYILGIAKAYCTRVGAGPFPTELFDEVGDHLGTKGHEFGATTGRKRRCGWFDAVAMRRAIQINSVTGFCLTKLDVLDGLKEIKICTGYQMPDGSIAEVSPMAADAFENVTPIFETMPGWSETTFGAKTLAELPQTALDYIKRIEELTGVPVDIISTGPDRNETIIKVHPFSA

SEQ ID NO: 77536 - protein, 485 aa, Vibrio cholerae
MTHWIAGEWVAGTGEKLESHTPYSHELLWQGYSASGEQVDAAVKAARRAFLDWKKRPFAEREQKVLAFAELVKANSEQIAQVIAKETGKPLWETRTEAASIAGKIAISIRAYHERTGETVREAAGNQLVLRHRPLGVMAVFGPYNFPGHLPNGHIVPALLAGNTVVFKPSEQTPWTGEVLMQLWQQAGLPAGVINLVQGSKETGIALAQSRGIDGLLFTGSANTGHLLHRQFAGQPDKMLALEMGGNNPMVISEHYGDLDATVYTIIQSAFISSGQRCTCVRRLYVPQGTKGDALLDKLVSVTAKLRIDQPFAEPAPFMGPLVSEAAAQAILKAQADLQALGGKSLLEARALHAAFITPAIIDVTAIERLPDDEYFGPLLQVVRYQTLAQAVELANDTRFGLSAGLVSTDDGEWDYFVEHIRAGIVNRNRQLTGASGDAPFGGPGASGNLRPSAFYAADYCAYPMASMEGDTTLLPATLSPGVEL

SEQ ID NO: 77537 - protein, 403 aa, Vibrio cholerae
MTVEMSVDRSSFDEVMVPCYNPMEFIPVKGFGSRIWDQQGHEYIDFAGGIAVSCLGHCHPVMVQALTTQANKLWHLSNVMTNEPALRLAKKLTQVSFAEKVFFANSGAEANEAALKLARRYAADVYGPEKSEIIAFNQGFHGRTFFTVSVGGQATYSDGFGPKPGDIVHLPYNDLAALQAQISDRTCAVMMEPLQGEGGIVSPSAEFVQAVRELCDKHNALLIFDEVQTGNGRTGDFYAYQGIGVTPDILATAKSLGGGFPIGAMLTTAKIAEHMKVGVHGSTYGGNPLACAVAEAVVDFVAQPEILAGVKQREQWMRAELEKINQKYQLFKEIRGKGLLLGAALNDEWQGRARDILVAAGKQGLMVLVAGASVVRFTPSLIISQQEIEEGMARLDKAIATLM

SEQ ID NO: 77538 - protein, 470 aa, Vibrio cholerae
MTVQTFTPNQTTTLETAKKTIAEQSQNSQTTGNKIGFVSLGCPKNLVDSERILTQLRTEGYEIVNSYHDSDVVIVNTCGFIDSAVQESLDTIGEALKENGKVIVTGCLGAREDEIRQVHPNVLGITGPHAYQNVLEHVHQYAPKPAHNPFTSLVPDHGVKLTPKHYAYLKISEGCNHRCTFCIIPSMRGDLVSRPVGEIIGEAERLKNAGVKELLVISQDTSAYGVDTKHSLGFANGSPVRHNIKALSEELGKMGIWVRLHYVYPYPHVDEIIPLMAEGKVLPYLDIPFQHASPRVLKMMKRPGQAERTLERIKKWREICPELVIRSTFIVGFPGETEEDFQILLDWLKEAQLDRVGCFKYSPVEGAAANEIEDQIPEDVKQDRFERFMLVQQEISAAKLQKRIGSTMQVLIDEVDEEGAIGRTYADAPEIDGLVYLNGETNLKPGELVNVVIEHADEYDLWGSILHDAQ

SEQ ID NO: 77539 - protein, 365 aa, Vibrio cholerae
MNRADSVRGFCPFVLCNFNFSHKEIKPMSKPIVLSGVQPSGELSIGNYLGALRQWQQMQDDYDCQYCVVDLHAITVRQDPQALHEATLDALAICLAVGVDPKKSTLFVQSHVPEHAQLGWVLNCYTQMGELSRMTQFKDKSARYANDVNAGLFGYPVLMAADILLYGAHQVPVGSDQKQHLELARDIATRFNNIYSPEQPIFTIPEPYIPTVNARVMSLQDATKKMSKSDDNRKNVITLLEDPKSIIKKINKAQTDAETPPRIAYDVENKAGIANLMGLYSAATGKTFAEIEAQYAGVEMYGPFKKDVGEAVVAMLEPVQAEYQRIRNDREYLNSVMRDGAEKASAKALQTLKKVYAAVGFVARP

SEQ ID NO: 77540 - protein, 835 aa, Vibrio cholerae
MQPQLNRDSPVKFIKRLLVFSLICIILGVTTIFGFYFYVKSDLPDVATLRDVQLQTPMQVFSQDGKLIAQFGEKRRIPLKLEEMPKELIEAVIATEDSRYYEHYGFDPIGITRAAFAVLASGSASQGASTITQQLARNFFLSNEKKVMRKVKEIFIAIHIEQLLSKQEILELYLNKIYLGYRSYGVGAAAQAYFGKEVKDLTLGEIALIAGLPKAPSTMNPIYSVERATNRRNVVLQRMLDEKYITKAEYDAARAEPVLPKYHGAEIELNAPYVAEIARAWMVERYGEEAAYTSGMNVYTTVDSKLQRAANQAAINNLLAYDERHGYRGAEKELWQVNQPAWSSTQLSEYLSNEPTYGDMFPAAVLSVEEKSAQVWVKSYGVQTIAWEDMNWARRFINDDRQGPLPKSANEFLAAGQQIWVRPRTQDGAITAWKLTQVPNANTAFVAMNPENGAVTALVGGFNFVHNKFNRATQSVRQVGSSIKPFIYSAALNKGLTLATLINDAPINQWDESQGTAWRPKNSPPTYTGPTRLRIGLAQSKNVMAVRVLREVGLDETREYLTRFGFKLDQLPRSETIALGAGSLTPVQMAQGFSVFANNGYFVEPFYISRVENPFGNIEFSAEPKVVCHRECSSELDEFAEQDAASPYAPKVISEQNAFLTREMLYSNIWGGGEWSSDTGWNGTGWRAQALKRRDIGGKTGTTNDSKDAWYNGYAPGIVGVAWVGFDDHSRNLGKTAPNRNIEDDVSGAESGGKTALPAWVEFMSLALQDVPVQQKAVPNNIARVRIDRDTGLLTNKLDSSSMFEYFEAGTEPTEYVSEHVNESIYSTSSGEELF

SEQ ID NO: 77541 - protein, 247 aa, Vibrio cholerae
MRNTMFTSKEGQTIPQVTFPTRQGDAWVNVTSDELFKGKTVIVFSLPGAFTPTCSSTHLPRYNELFPVFKEHGVDSILCVSVNDTFVMNAWKDDQNADNITFIPDGNGEFTDGMGMLVDKNDLGFGKRSWRYSMLVKDGVVEKMFIEPNEPGDPFKVSDADTMLKYIAPQYKVQESVTIFTKPGCPYCAKAKQALIDAGLQYEELILGKDATTVSLRAVSGRTTVPQVFIGGKHIGGSDDLEVYLNQ

SEQ ID NO: 77542 - protein, 458 aa, Vibrio cholerae
MALWGGRFTQAADSRFKSFNDSLRFDYRLAEQDIVGSIAWSKALVSVNVLSVQEQQQLEQALNHLLQSVQQDPEQILASDAEDIHSWVEQKLIEQVGDLGKKLHTGRSRNDQVATDLKLWCRDQGVHLLLALKTLQQQLVAVAAEHQSTVLPGYTHLQRAQPVTFTHWCLAYLEMFERDESRLTDALARLNTSPLGSGALAGTAYAIDREVLAADLGFTRATRNSLDAVSDRDHVMELMSVASISMLHLSRLAEDMIFYTTGEAGFIELADTVTSGSSLMPQKKNPDALELIRGKTGRVYGALAGMMMTVKALPLAYNKDMQEDKEGLFDALDTWFDCLQMAGLCFDGIKVNAARTLEAAKQGYSNATELADYLVAKGIPFREAHHIVGVAVVAAIGKGVALEELCLAELQQFSPLIEQDVYPILTIESCLEKRCALGGVSPKQVAHALQQAQARVKS

SEQ ID NO: 77543 - protein, 273 aa, Vibrio cholerae
MKQCAHTKVWQTIVAEAREQAEQEPMLASFYHATIIKHDSLKAALSYILANRLNTASMPAMAVREVIEEAFAADPSISEAAACDICATVNRDPAVSMYSMPLLYLKGYHALQGYRVANWLWRQGRKALATYFQNQISVACQVDIHPAARIGRGIMLDHATGIVIGETAVVEDDVSILQDVTLGGTGKECGDRHPKIREGVMIGAGAKILGNIEVGEGAKIGSGSVVLQAVPPHTTVAGVPARIVGRPQSDKPSLDMDQQFNGRSQTFIGGDGI

SEQ ID NO: 77544 - protein, 344 aa, Vibrio cholerae
MSETQNHNSYGKPVEMTVIGAGSYGTSLAISLARNGANIVLWGHDAEHMARLDADRANHEFLPGIAFPDTLIVETDLQKAVQASRDLLVVVPSHVFGIVLKSLQPHLRADSRICWATKGLEPETGRLLQDVAHDVLGDSYPLAVLSGPTFAKELAMGMPTAISVASPDAQFVRDLQEKIHCSKTFRVYANSDFIGMQLGGAVKNVIAIGAGMSDGIGFGANARTALITRGLAEMSRLGAALGAQPETFMGMAGLGDLVLTCTDNQSRNRRFGLALGQGKDVDTAQTDIGQVVEGYRNTKEVWMLAKRMGVEMPIVEQIYQVLYQGKDARLAAQDLLARDKKMER

SEQ ID NO: 77545 - protein, 144 aa, Vibrio cholerae
MQEYIEFFQQNMILSLAWIGILVALIASIYKSATAAYQEVTATQATLLINRENGIVVDIRSKDEFKQGHITDAIHILPSDIKAGNLAGLESHKSNPIIVVCKTGQTARESADLLTKAGFEKVNLLKNGLIAWNEANLPLVRGKR

SEQ ID NO: 77546 - protein, 349 aa, Vibrio cholerae
MSQLSLAFCSERVQFVISVSCDEPPMTNSDWMPTASISQLKQRATLLRQIREFFAERNVLEVETPAMSHATVTDIHLHTFKTEFVGPGYAKGSALHLMTSPEFHMKRLLAAGSGCIYQLGKAFRNEENGRYHNPEFTMLEWYRIGFDHHALMDEMDALLQLVLRCGSAERMTYQEAFLNVLGVCPLEEEMRELKQVAATLGLSDIAEPEEDRDTLLQLLFSIGIEPKIGQITPAFVYDFPASQAALAKINPADPRVADRFEVYFKGIELANGFHELDNPAEQLARFKADNAKRLEMGLTEQPIDYHLIAALEAGLPECAGVALGIDRLIMLALGEDHIDKVTAFPFPRA

SEQ ID NO: 77547 - protein, 544 aa, Vibrio cholerae
MAAKDVRFGNDARVKMLEGVNILADAVKVTLGPKGRNVVLDKSFGAPTITKDGVSVAREIELEDKFQNMGAQMVKEVASQANDAAGDGTTTATVLAQAIVNEGLKAVAAGMNPMDLKRGIDKAVIAAVEELKALSVPCADTKAIAQVGTISANSDSSVGNIIAEAMEKVGRDGVITVEEGQALQDELDVVEGMQFDRGYLSPYFINNQESGSVELDNPFILLVDKKISNIRELLPVLEGVAKASRPLLIVAEDVEGEALATLVVNNMRGIVKVAAVKAPGFGDRRKAMLQDIAILTGGVVISEEIGLELEKATLEDLGQAKRVSITKENSTIIDGAGDQAAIQGRVAQIRQQIEEATSDYDKEKLQERVAKLAGGVAVIKVGAATEVEMKEKKDRVEDALHATRAAVEEGVVAGGGVALIRAASKLSSLVGDNEEQNVGIRVALRAMEAPLRQIVKNAGDEESVVANNVRAGEGNYGYNAATGVYGDMIEMGILDPTKVTRSALQFAASVAGLMITTEAMITELPKKDAPAMPDMGMGGMGGMM

SEQ ID NO: 77548 - protein, 116 aa, Vibrio cholerae
MPNLVMEYSNSVDERINVQGLLEDLHRAAIDSGLFEISSVKSRALRCHHWLIGDEGDSVDFIHLSFELLAGRSPEQKRELSRKLMEILAAKASHVRSLTINIRDMDTDCFQKVINR

SEQ ID NO: 77549 - protein, 185 aa, Vibrio cholerae
MTTIVSVRRNNKVVIAGDGQVSLGNTVMKGNARKVRRLYNNKVLAGFAGGTADAFTLFERFESKLQMHQGHLTKAAVELAKDWRSDRALRRLEAILAVADETASLIITGNGDVLQPEHDLIAIGSGGNYAQAAAIALLENTELDARTIAEKALNIAGDICVFTNHHHTIEELEIPQAMLPQGASA

SEQ ID NO: 77550 - protein, 105 aa, Vibrio cholerae
MADWNGEYISPYAEHGKKSELVKKITVSIPLKVLKVLTDERTRRQVNNLRHATNSELLCEAFLHAYTGQPLPTDEDLRKDRPDDIPAEAKRLMTEMGIEFESYDE

SEQ ID NO: 77551 - protein, 335 aa, Vibrio cholerae
MKRDLAMAFSRVTEGAALAGYKWLGRGDKNAADGAAVEVMRILLNQTEISGEIVIGEGEIDEAPMLYIGEQVGLGGDAVDIAVDPIEGTRMTAMGQSNALAVLAAGEKGSFLKAPDMYMEKLVVGPGAKGCIDLNLPLKDNLNHVAKALGKPLTDLVVITLAKPRHDQVIAQMQQMGVRVFAVPDGDVAASILTCMPDSEVDMMYCIGGAPEGVVSAAVIRALDGDMQGRLLPRHQVKGDSEDNRIWGAKELERCQQMGVEAGKVLKMEDMARSDNVIFAATGITKGDLLDGISRKGNIATTETLLIRGRCRTIRRIRSIHYLERKDQQVRDIIL

SEQ ID NO: 77552 - protein, 331 aa, Vibrio cholerae
MIFDSQSSRVSMIKKIGVLTSGGDAPGMNAAIRGVVRTALGAGLEVFGIYDGYQGLYEDRIKQLDRSSVSDVINRGGTFLGSARFPQFREVEVREKAIENLKKHGIEALVVIGGDGSYMGAKKLTEMGFPCIGLPGTIDNDIAGTDYTIGYLTALNTVIEAIDRLRDTSSSHQRISIVEIMGRHCGDLTLTSAIAGGCEYIITPETGLNMEQLISNIKDGIAKGKKHAIIALTELMMDANKLAKEIESATGRETRATVLGHIQRGGKPTAFDRVLASRMGNYAVHLLMEGHGGRCVGIQKEQLVHHDIIDAIENMKRPVRTDLYKVAEELF

SEQ ID NO: 77553 - protein, 167 aa, Vibrio cholerae
MKLAKKMILAAAVLPLTLGTTAALAYGGHGWDKEGDGHCGDRGERGIWKQLDLTAEQQAQLKEMREAGREEMRANRGQSHDAMKALHAQERALVLAADFDQAAAENLAKQMVDQQVTHRVKMMEKRHQMMSILTAEQKAKLQTLQQEKMAECMQDGQHGKGKKHASQ

SEQ ID NO: 77554 - protein, 158 aa, Vibrio cholerae
MFDIALYEPEIAPNTGNIIRLCANCGANLHLIEPLGFDLEEKKVRRAGLDYHDLARVTRHKDYAAFIEYLQRERGSFRLFACTTKTTQHHVDAQFQQGDVLLFGPETRGLPAELIASLPAEQRIRIPMMPEARSLNLSNAVAIIAFEAWRQMGFDGAR

SEQ ID NO: 77555 - protein, 223 aa, Vibrio cholerae
MNHFTPAQQRKALGYLVLFHLVIIASSNYLVQIPFTIFGFHTTWGAFTFPFIFLATDLTVRIFGAGLARKIIFLVMLPALAVSYLLSVVFFEGQYQGLAPLSEFNLFVARIAIASFMAYLLGQIMDVHVFNRLRQMKQWWVAPTCSTLFGNALDTIAFFSIAFYQSSDPFMAEHWTEIALVDYTFKLIISLGLFVPMYGVLLNYLIKKLTAVNPNFAMASAKA

SEQ ID NO: 77556 - protein, 705 aa, Vibrio cholerae
MYLFDSLKDVAQEYLTEPQIEALRQSYVVARDAHEGQTRSSGEPYIIHPVAVARILAEMRLDLETLQAALLHDVIEDCDVTKEDLDAHFGSSVAELVDGVSKLDKLKFRDRKEAQAENFRKMVLAMVQDIRVILIKLADRTPNMRTLGALRPDKKRRIARETLEIYAPLAHRLGIHNIKTELEELGFEALYPNRYRVLKEVVKAARGNRKEMIQRIHSEIEGRLQEVGLPARVVGREKNLFSIYNKMKTKEQRFHTIMDIYAFRIVVDTADTCYRVLGQVHSLYKPRPARMKDYIAVPKANGYQSLHTSMVGPHGVPVEVQIRTEDMDQMADKGVAAHWSYKANSERGGTTAQIKAQRWMQSLLELQQSAGNSFEFIENVKSDLFPDEIYVFTPKGRIVELPMGATAVDFAYAVHTDIGNTCVGARVDRTPYPLSQSLKSGQTVEIISAPGARPNAAWLNYVVTSRARTKIRQVLKTMRREDSITLGRRLLNHALGEHSVNEIAPENISKVLSDLKIASMDDLLAAIGLGELMSIVIARRLLGNADELTEPSKSGGNKNKLPIRGAEGILLTFANCCHPIPDDHIIAHVSPGRGLVVHRETCPNVRGYQKEPDKYMAVEWTKDYDQEFITELKVDMHNRQGALAELTNVISKTGSNIHGLSTEERDGRLYTVTVLLTTKDRVHLAGIMRKIRTMPHALKVRRRKN

SEQ ID NO: 77557 - protein, 438 aa, Vibrio cholerae
MRIRSSFTQSILLFFSLLIASQIYSYYAVFNYALLPSLQQFNKILAHEISLMLDDTSNPNVSSEMDALLKRRVLEQLGVTIHSNDSPEAVEYQHAISLDLMSEEMSSELGSPTEVRMALGEESYILWMKIDSLPGQLLRIPLSELQEEDFAPLFRNSIIMALLIVIGGWLFIRLQNRPLIALEKAAKMVGRGETPPHLPEQGTLEIRSVTRAFNRMSKGIQALEEDRALLMAGISHDIRTPLTRIRLATEMMSPEDSYLAESIISDTEECNQIISQFMDYLKPVNREAFEAVDLNDIASDVASSEGGYEVQIETELQAGLAPALGNPIAIKRSLSNLVVNALRYGNGWVKVSSGMTADKKLVWLSVEDNGPGIDPSQVNKVFEPFTRGDTARGSEGTGLGLAIVKRIVSQHHGAVSVSNRSQGGLRAQISFPTKQQKG

SEQ ID NO: 77558 - protein, 773 aa, Vibrio cholerae
MSKAICHQIAQELNVRPEQVIAAVTLIDDGNTVPFIARYRKEVTGGLDDTQLRNLDSRLAYLREMDDRRQTILKSIQEQGKLTPELEQAILSADSKNRLEDLYLPYKPKRRTKGQIAIEAGLEPLADTLWTQPNTDPESEAAKYINAEKGVADSKAALDGARAIVMERIAEDANLLEKIRQHLNRNAEIVSRVIEGKEQAGEKFKDYFDHREPISKAPSHRALAMLRGRNEGFLTLTLNADPELEESARQSYCETLIAEHYGIHLSQATADAWRKQVISWAWKIKISMHMETELMSAMKERAEIEAIEVFATNLKDLLMAAPAGPRATLGLDPGLRTGCKVAVVDATGKVLATDTIYPHAPQHQYDRAMQSIALLVKKFNVDLIAIGNGTASRETDAFAADLIKRGNLKVQKIMVSEAGASVYSASELAAKEFPNLDVSLRGAVSIARRLQDPLAELVKIDPKSIGVGQYQHDVSQTLLAKRLDAIVEDCVNAVGVDVNTASAALLTRVAGLSAALAQNIVDYRDENGRFESRSALKKVPRLGPKAFEQCAGFLRIMDGKNPLDASAVHPEAYPVVKTIAEKNSKDLKALIGNTEFLRTLRAVDYTDENFGVPTVTDIIKELDKPGRDPRPEFKTATFAEGIHEVSDLEVGMVLEGVVSNVANFGAFVDIGVHQDGLVHISALTDRFISDPREVVKAGDIVKVKVMEVDVQRKRIALSMRLNDEPGQDNRSQRSAAPRSGQERRAPRRDEPQGNALGGAMGGAFAAAFAKAKK

SEQ ID NO: 77559 - protein, 127 aa, Vibrio cholerae
MAMSSSAEEVRLDKWLWAARFYKTRSLARNMVEGGKVHYNGQRAKPSKSVEIGAQITLRQGHDEKTIIIEKISDQRRGAPEAQQLYRETAESITKRERNAMMRQLNPSPDRRPDKKQRRDLLKFIHQ

SEQ ID NO: 77560 - protein, 296 aa, Vibrio cholerae
MTTQSMANNMLHRYLFKDLSVRGELVQLDDTYQQMISSQEYPAAVQHLIGELLVATSLLTATLKFEGSITLQLQGNGPVSLVVINGDNNQQVRGVARWKGDIADDASLHDMLGKGHLVITIEPKQGERYQGVVGLEGDTLAQVLEGYFERSEQLKTRLWIRVGKHDGKACAAGMLLQIVPDGKGSAEDFEHLEQLTNTIKDEELFALPAEELLYRLYNQETVQLFTPQQISFRCGCSRERSAAAIVTVAREEINDILAQDGAVALHCDYCGTTYSFDSAQVAELYAPSSANGSTLH

SEQ ID NO: 77561 - protein, 542 aa, Vibrio cholerae
MTVMEHTKAAQIDLAQYGITGVTELVRNPSYEMLFAEETRSDLEGYERGVVTELGAVAVDTGIFTGRSPKDKFIVKDDTTRDTLWWTSDKAKNDNKPINQEVWNDLKALVTKQLSGKRVFVLDGYCGANADTRLSVRFITEVAWQAHFVKNMFIRPSEEELAHFKPDFVVMNGAKCTNAKWKEHGLNSENFTVFNLTERMQLIGGTWYGGEMKKGMFAMMNYFLPLQGIASMHCSANMGKAGDVAIFFGLSGTGKTTLSTDPKRALIGDDEHGWDDDGVFNFEGGCYAKTIKLSKEAEPDIYNAIRRDALLENVTVRSDGSIDFDDGSKTENTRVSYPIYHIDNIVKPVSKGGHATKVIFLSADAFGVLPPVSKLTPEQTKYHFLSGFTAKLAGTERGITEPTPTFSACFGAAFLTLHPTQYAEVLVKRMEAAGAEAYLVNTGWNGSGKRISIKDTRGIIDAILDGSIEKAETKHIPIFNLQVPTALPGVDPMILDPRDTYVDPLQWESKAKDLATRFINNFDKYTDNAEGKALVAAGPKLD

SEQ ID NO: 77562 - protein, 609 aa, Vibrio cholerae
MTTPQIEKLRNIAIIAHVDHGKTTLVDKLLQQSGTLESRGDVEERVMDSNDIEKERGITILAKNTAINWNDYRINIVDTPGHADFGGEVERIMSMVDSVLLIVDAVDGPMPQTRFVTQKAFAHGLKPIVVINKIDRPGARPDWVMDQVFDLFDNLGATDEQLDFQVVYASALNGWATLVEGETGENMEPLFQAIVDNVAAPQVDLDGPLQMQISQLDYSSYVGVIGVGRIKRGKVKPNQQVTVIGADGKKRNGKIGTVLGYLGLQRSETDQATAGDIVAVTGLGELKISDTICDVNALEALPPLSVDEPTVTMTFQVNTSPFAGKEGKFVTSRNILERLEKELVHNVALRVEQTEDPDKFRVSGRGELHLSILIENMRREGFELAVSRPEVILKHEDGQLMEPFETVTIDVQEEHQGGIMEKIGMRKGELKDMSPDGKGRIRMDFVMPSRGLIGFQTEFMTLTSGSGLLYHSFDHYGPHKGGVIGQRVNGVLVSNGTGKALTNALFNLQERGRMFIGHGVEVYEGMVIGIHSRDNDLTVNPLKGKQLTNVRASGTDDAQVLTPPIIMSLEQALEFIDDDELVEVTPVSIRIRKRFLTENDRKRASRDAK

SEQ ID NO: 77563 - protein, 469 aa, Vibrio cholerae
MSVENVLSLIQENEVKFVDLRFTDTKGKEQHISIPAHQIDADFFEDGKMFDGSSVAGWKGINESDMVMMPDPSSAVLDPFTEDATLNIRCDILEPATMQGYDRDPRSIAKRAEEYMRSTGIADTVLVGPEPEFFLFDDVKFATNMSGSFFKIDDVEAAWNTGTEYEDGNKGHRPGVKGGYFPVAPVDSSQDIRSAMCLIMEEMGLVVEAHHHEVATAGQNEIATRFNTLTTKADEIQIYKYVVHNVAHAFGKTATFMPKPLVGDNGSGMHVHQSLAKDGVNLFAGDKYGGLSETALYYIGGIIKHARALNAITNPSTNSYKRLVPHYEAPVMLAYSARNRSASIRIPVVPSPKARRIEVRFPDPAANPYLAFAAMLMAGLDGIKNKIHPGEAMDKDLYDLPAEEAAEIPKVAESLQQALQYLDADREFLTAGGVFSDDFIDSYIALKTKDVERVNVAVHPLEFELYYSV

SEQ ID NO: 77564 - protein, 354 aa, Vibrio cholerae
MSVSAELSQTIINNQVTSVLILDESLMIRYANPAAEQLFSQSAKRLMHQSLNHLVQHSSLDLQLLTQPLQSGQSITDSDVTLVIDSKPLMLEVTVSPISWHKELLLLAEMRTIGQQRRLTQELNQHAQQQAAKLLVRGLAHEIKNPLGGLRGAAQLLERMLPDPALMEYTQIIIEQADRLRGLVDRLLGPQRPGEKKWENLHLILEKVRQLVELEAGANLVFERDYDPSLPNILMDTDQIEQALLNIVSNAAQILTNQTHGVITLRTRTVHQANIHGQRHKLVASIEIIDNGPGIPPELQDTLFYPMVSGREGGTGLGLSISQNLIDQHQGKIEVQSWPGRTVFTIYLPILNCC

SEQ ID NO: 77565 - protein, 387 aa, Vibrio cholerae
MNTVVIVDCLRTPMGRSKGGAFRHQRAEDLSAHLMKGILARNPQVNPKEIEDIYWGCVQQTLEQGFNVARNAALLAGLPIEIGAVTVNRLCGSSMQALHDAARAIMVGDAEICLVGGVEHMGHVPMTHGVDFHPGLSKNVAKAAGMMGLTAEMLGKLHGISRQQQDEFAARSHARAHAATLEGRFKNEILPTEGHAADGTLFTLDYDEVIRPETTVAGLAELRPVFDPANGTVTAGTSSALSDGASAMLVMSEQKAKALGLTIRARIKAMAVAGCDPSIMGYGPVPATHKALQRAGLTMQDMDVVELNEAFAAQSLPCAKDLGLLEMMDDKVNLNGGAIALGHPLGCSGTRISTTLINLMEAKDAKYGLATMCIGLGQGIATIFERP

SEQ ID NO: 77566 - protein, 453 aa, Vibrio cholerae
MKFSTVILAAGKGTRMHSNMPKVLHTLAGKPMVKHVIDTCNNLGAQNIHLVYGHGGDQMQQALANENVNWVLQAQQLGTGHAVDQASPHFQDDEKILVLYGDVPLISEDTIESLLEAQPTDGIALLTVVLEDPTGYGRIVRKRGPVVAIVEQKDASEEQKLIKEVNTGVLVATGRDLKRWLAGLNNNNAQGEYYLTDVIAAAHDEGRAVEAVHPSHSIEVEGVNDRIQLARLERAFQARQAKKLLEQGVMLRDPARFDLRGTLQCGSDVEIDVNVIIEGNVSIGNNVVIGAGSILKDCEIDDNTVIRPYSVIEGATVGENCTVGPFTRLRPGAELRDDAHVGNFVEMKNARLGEGSKANHLTYLGDAEIGKGVNVGAGVITCNYDGANKHKTVIGDDVFVGSDCQLVAPVTIGNGATIGAGTTLTKNVAEGELVITRAPERKIAGWQRPAKKK

SEQ ID NO: 77567 - protein, 523 aa, Vibrio cholerae
MHCSLDGDWSMQLNSTEISDLIKQRIESFNVVSEARNEGTIVSVSDGIIRIHGLADVMQGEMIELPGNRYALALNLERDSVGAVVMGPYADLREGMKVTGTGRILEVPVGPELLGRVVNTLGEPIDGKGPIGAKQTSPVEVIAPGVIDRKSVDQPVQTGYKSVDSMIPIGRGQRELIIGDRQTGKTALAIDAIINQKNSGIYSIYVAIGQKASTIANVVRKLEEHGALKNTIVVVASASESAALQYLAPYSGCAMGEYFRDRGEDALIVYDDLSKQAVAYRQISLLLRRPPGREAFPGDVFYLHSRLLERAARVNEEYVERFTKGEVKGKTGSLTALPIIETQAGDVSAFVPTNVISITDGQIFLQTELFNAGVRPAVDPGISVSRVGGAAQTKIVKKLSGGIRTALAAYRELAAFAQFSSDLDEATKRQLTHGQKVTELMKQKQYAPMSVFDQALVIFAAERGYLTDVELNKVLDFEAALLSYARAHYAELAAQIDKTGAYNDEIEAQLKKLVDDFKATQTW

SEQ ID NO: 77568 - protein, 177 aa, Vibrio cholerae
MSDLTTIARPYAKAAFDFAVEKQQLGHWSQMLAFTAEVAKNEQMHELLTSSGSANKLAEIFIAVCGEQLDGHGQNLIKVMAENGRLLAIPALYEHFAVLKQEHEKKVDVEVISATELSEQQRSEIGSKLEQRLERKVQLNCSVDETLLGGVIIRAGDLVIDNSARGRLKRLSDALQS

SEQ ID NO: 77569 - protein, 85 aa, Vibrio cholerae
METVLSFSAIAVAIIVGLCAVGTAIGFAVLGGKFLEGAARQPEMAPMLQVKMFIIAGLLDAVPMIGIVIALLFTFANPFVGQLAG

SEQ ID NO: 77570 - protein, 270 aa, Vibrio cholerae
MAAPGEALTPSSYITHHLTNLSTYKLGLVAEESSFWNVHIDSLFFSVLTGLIFLGVFRAVARKATAGVPGKLQCAVEMVVEFVDKNVKDTFHGRNPLIAPLALTIFCWVFLMNLMDLVPIDFLPYPAQHWLGIPYLKVVPSADVNITMAMALGVFALMIYYSIKVKGLGGFAKELALHPFNHWIMIPFNLLIEVVSLLAKPLSLGMRLFGNMFAGEVVFILCAAMLPWYLQWMGSLPWAIFHILVILIQSFVFMMLTIVYMSMAHEDNDH

SEQ ID NO: 77571 - protein, 257 aa, Vibrio cholerae
MGKIVAIANQKGGVGKTTTCINLAASMAATKRKVLVVDLDPQGNATMASGVDKYQVDSTAYELLVEDAPFDQVVCRKTTGHYDLIAANGDVTAAEIKLMEVFAREVRLKNALASVRDNYDFIFIDCPPSLNLLTINAMAAADSVLVPMQCEYFALEGLTALMDTISKLAAVVNDNLKIEGILRTMYDPRNRLANEVSDQLKKHFGSKVYRTVIPRNVRLAEAPSHGKPAMYYDKQSAGAKAYLALAGEMLRREEIPA

SEQ ID NO: 77572 - protein, 210 aa, Vibrio cholerae
MNPLRVKLDALISKTSLTVTEQQREQLVGYVQLLDKWNKAYNLTSVRDPMEMLVKHILDSLVVSPHLVGERFIDVGSGPGLPGIPLAIMHPDKEFVLIDSLGKRIRFLKQVIHDLKINNVLPVQSRVEEFDPESGFDGVLSRAFASMTDMVNWCQHLPKPNAGVFLALKGVRPDDEITLLPEWCSVTDIKALQVPELEGERHLVILSRKG

SEQ ID NO: 77573 - protein, 631 aa, Vibrio cholerae
MLYHETFDVIVVGGGHAGTEAALAAARTGQRTLLLTHNIDTLGQMSCNPAIGGIGKGHLVKEVDAMGGLMAQAIDHAGIQFRTLNASKGPAVRATRAQADRALYKAYVRNVLENTPNLTLFQQAVDDVIVEHDHIRGVVTQMGLKFHAKAVVLTVGTFLGGKIHIGLENYAGGRAGDPPSIALAHRLRELPFRVDRLKTGTPPRIDANSVDFSVLEAQHGDNPTPVFSFMGKREHHPRQIPCYITHTNERTHDVIRANLDRSPMYAGIIEGIGPRYCPSIEDKVMRFADKDSHQIFIEPEGLTTTELYPNGISTSLPFDVQVQIVRSMKGFENAHIVRPGYAIEYDFFDPRDLKQTYETKYIHGLFFAGQINGTTGYEEAAAQGLMAGLNASLYSQDKEGWSPRRDQAYMGVLIDDLSTMGTKEPYRMFTSRAEYRLLLREDNADLRLTEKARELGLVDDARWARFNQKIDNMAKERQRLQETWMNPNSVGVEQLNTLLKTPMSREASGEDLLRRPEMTYELLTTLPAFAPALEDAEAAEQVEIQVKYDGYIQRQQDEIEKSLRHEHTKLPAELDYKQVKGLSNEVVLKLNAAKPETIGIASRISGITPAAISILLVHLKKHGMLKKGEAA

SEQ ID NO: 77574 - protein, 239 aa, Vibrio cholerae
MGRSFEVRKASMAKTQGAKIKVYSKYGKEIYVCAKNGGTDPDMNLSLRHLITKAKKDQVPAHVIEKALDKASGGAGEDYQPARYEGFGPGGASVIVDCLTDNGNRTYQDVRQCFVKTGAKIGTPGVVAHMFDHQAVFQFQGDDEEAILEALMMADAEVTDIEHEDGVITVFAPNTEFFKVKTALNEAFPDLTLDVEEITFVPQNRTVVSGEDAEKFQKFLDMLDDCDDVQQVYHNADIE

SEQ ID NO: 77575 - protein, 694 aa, Vibrio cholerae
MATLAYSIEVEGLEDETLVVRGFHGQESLSNSVFLGQACYGFRYQMQLASRVSNLTADQMVDKRAELKLYRNSQLVQRVHGIVRAFSQGDIGHHHTFYQLTLVPALERLSLRHNSRIFQKQTVPEILSILLQEMGIHDYAFALKRDCVQREFCVQYRESDIDFLHRLAAEEGLVYSFVHEAGKHTLYFSDASDSLSKLPEPIPYNALAGGTMDTPYIHGLTYRTQAEVSEVQLKDYSFKKPAYSFLQTVQGTELDYQQTRYQHFDAPGRYKDDVNGAAFSQIRLDYLRRHAHTATGQSNEPLLRAGYKFDLQEHLDPAMNRDWVVVSINHQGEQPQALQEEGGSGATTYNNQFSLIPGHLHWRAEPQPKPQVDGPMIATVVGPEGEEIFCDEHGRVKIHFPWDRYSNGNEQSSCWVRVSQGWAGSQYGFIAIPRIGHEVIVSFLNGDPDQPIITGRTYHATNTPPYTLPEHKTKTVLRTETHQGEGFNELSFEDQAGKEQIYLHAQKDFDGLIENDHTTVIRHDQHLTVENDQFTQIKHNQHLTVEGESRTLVKLDCSSEIGGSLQQKIGSKAIYDAGTEVHLKAGNKLVLEAGNELTIKAGGSFIKVDAGGVHVVGSAINLNSGGSAGSGSGYGGKMAELPQGVDKAKTPQEIELAAVTPTQQSMSPLLKARQIEALKGPAPVCEVCEEAKGN

SEQ ID NO: 77576 - protein, 346 aa, Vibrio cholerae
MPSVVMSNHQKIASLELGRVIAMLAIIALHCQLFTTYWFLDDEPWVAYLFNQSTRFAVPLFFLISGYLIQPKLSHNPMQTLRNYCSPLLRIWVIWSVISLLMPFNLEVMVNQGYLAERSGYWGFLLQHPLNSLFEGGLVHLWFLPALMIAVAIMALLIRQQKTHWMLPIAIGLYLYGEFAGSSAVVTGMSAPIYTRNGPFFSTLFVVVGYLIRERHILWQSRSALLLAMLGMAFHFVEAYGLHQYGQVFNTNDYLFGTTLWAIGLFLFLLAKPDLGRKPWGFSLSQSILGFYVSHLLVVIMMMNLARFLGLAGLEKDTLVLFGTLLTTYLLVKGLERTPLKHLLFR

SEQ ID NO: 77577 - protein, 306 aa, Vibrio cholerae
MWWKVWVIGCALAVSWSINAAVFDLPIEGSSIVGNTQYHKVEKGETLADIAKKYDIGFLALMAANRGVDPFLPQEGFVISIPAKIILPKVAYEGIVINLAELRLYYFRPNEGKVHIFPVGIGRIGRDTPVMQTSISSKRKYPTWTPPASIRKEYKAKGIDLPPVVPAGPENPLGDYAMRLAYGSGEYLIHGTNKDFGVGMRVSAGCIRMDPKDIEWLYQQVERGEKVRIINEPIKVALEPDRSVFIEVHEPLTRSNGVKKNLVVPEELSWWLQEHKISDAKARAAVLAQNGVPVEIAPPQWETIAQ

SEQ ID NO: 77578 - protein, 713 aa, Vibrio cholerae
MKLSPVSAAVLSVLAAGFAHAETEPSHYEEVVVTANRIEQPLSEVAGSVAVLEGETLEKQGKTELYDALNQEPGVSVTGGAGRPQNITIRGMTGNRIAIVRDGIQSADGYGAADINDKYGRNTFSLSNVKQIQVVKGASSTLYGSGAIGGVVIIESKAPEDYLYHRDYYVDAALTYSGISNRYQGNHALAMRHGDGEALLTIDYWQGEETRNFNQDLYNREVDGYNLGFSHHYWLNDALRLKTHLEYFDDYAKRREGTSSIQKDDKWDLVSFYEYQRSQTRLASVGADYTANLSWMDTLEGKFYWRSTENITQTNRLMANDRSGAGILSYRRELRDEGFNDEALGATLNAQKEWQQGEWLHQFAYGMSVDGHDYQRPKSIRRMESSGDDLQADEPFAPAREYRFGVYGQDNLLLGDWTLAAGLRFDAQKLSPKNTDRIHGYKVVTMGSSEWSPSASISYQWHPEWNTYLSYNHGFRAPSYDKAYGASDHSFVPLTPFIIKPNNKLRAETSDSFELGSKYDNGQTQFYVAVFYSIFDNFIDVKQVGYDNATGSVIQQYQNIAGVKTYGAEMSVMHRLDDRWSVENKLGYVDGKDGENQYVRTLTPLEGSVQLNYQRERWDAYSRLNWASAMSRVPTCTTEQGKETECATTTGWVSWDIGLNYQWNAQLSASFNVVNLLDREYTRYQDVAGVTPSDTLYSTEPGRYFTVHAKYVF

SEQ ID NO: 77579 - protein, 327 aa, Vibrio cholerae
MPDPNWVGYFVYIDLSSIGDFMTIATNSDKLMDNTSMRSLREQRRVDWKERIFHGLFMTSAVIGILSLAIIAYFIVRESIPAFQEAGVTGIVLGQDWLPPALYGVATMIVASVVSTFGAVIVGVPVGVLTAIFIAEVAPKRVADVIRPAVELLAGIPSVVYGFFGLVIIVPLIQDVFDVPAGNTILAGIIVLGVMILPTVITVSETSIRAVPRAYKEGSLALGASSIYTIFKLLVPAARSGIMTGVILGIGRALGETMAIIMVMGNAPAMPEGLLDSARTLTANIAIEMSYASGIHANALYATGVVLLVFIMMLNGALLYLNREKAR

SEQ ID NO: 77580 - protein, 553 aa, Vibrio cholerae
MFAIYESYKAGQLQPKQWVNNITAGLIVGVVALPLAMAFAIASGVKPEQGIYTAIIAGIIVSLFGGSRVQIAGPTGAFIVILAGIVAEHGVAGLQIATIMAGFILVVLGLARLGSIIRYIPDPVIVGFTSGIGVIIWVGQWRDFFGLPEIKGEHFHQKLVAIFHAFPQFHLTTTLLALLSLALVIFGPKIPKLSKIPGPLLALVVVTSLQYVVGFEGVRTIGSAFGGIPQGLPEFALPDLSLSQMIQLIGPAFAIAMLGAIESLLSAVVADGMAGTKHNSNQELVGQGIANIVAPLFGGIAATGAIARTATNIRNGGNSPIAGVMHALTLVIILLVLAPLAVNIPLATLSAILFVVAWNMSEAPHFVQLAKRAPRADVAILLLTFGLTVFADLVVAVNIGVIIAMLHFVKRMASSVEVKANGSQEMSYELAQHGRSTLPRELAVYALEGPFFFAAAETFERVMGSIQETPQILILRLKWVPFMDITGIQTLEEMIQSFHKRGIKVLISGANSRVSQKLVKAGIVKLVGEQNVYPVFEGALSAALTEIEAQPTE

SEQ ID NO: 77581 - protein, 430 aa, Vibrio cholerae
MISKSIILRFSELSMRKKATLVGLPLLAVAAISSSLNSPTRQQRIELSLPESPLVQFSSAEHTVEVVKVGHPDYEYEIKPGDNLSTIFNQLGFAYTELMKVMETDLNYLALDTLRPGNVLRFWKGSDNTLAKMELEFSLVDRAVYTRLNDGSYEFEERKIPGTWKVEPLIGEVDGSFSLSANRAGLGAADVDQIVTLLKDKINFGRDLRRGDRFEVVLSRQLVGEKLTGNSEIQAIKIFNRGKEITAYLHQDGQYYDKNGDSLQRAFQRYPVDSKWRISSNFDPRRLHPVTKRVAPHNGTDFAMPIGTPVYTSGDGVVVMTRNHPYAGNYVVIQHGNTYMTRYLHLSKILVKKGQKVSRGQRIGLSGNTGRVTGPHLHYELIVRGRPVNAMKANIPMASSVPKKEMAQFIAKRKELDQMLARQESMLAAQ

SEQ ID NO: 77582 - protein, 238 aa, Vibrio cholerae
MIVTIDMICLRLAPKGIETLLVKRSNPNRPDCGLWAIPGGWVFDEDLSAQGGEPADKDFDSARRRICRQKIHTYPNFISDPLVDGNPKRDPSGWSISISHYALLNHSNVTQIEEAEMDKSRVNWFALETILQGKQVLAFDHVAQIQHAWKKLRAAVEYTSVVLFSLELEFLVADIIEAYAKFGVDVNRMTVKRRLIDTGVIVSTNKIAASSKGKGGKPATVYRLASNEVIYFQTCLRG

SEQ ID NO: 77583 - protein, 435 aa, Vibrio cholerae
MNPRLFSPHIIRSLLDLDAYKINMMQAIHHFYPDVSVRYELIVRSEEDASGLLDAIRQEIAHLGTLRFSDADIHYLTQHAPHLKATFLQSLRYFHFVPQEQVEMGIVKQGGKQQLRISIRGSWRDTILYETLVMAIVSEVRSRQRWAEVPADLPLKVLKTKLDQLKAEIERRGINNFSLTEMGTRRRFSSQVQRDVLACLKQEIPQWVLGTSNYHFAREFDLKPIGTIAHEWFMGHQALVNERDSQQVALERWLTAFDGMLAIAPTDTLTIDAFLNDFNRHLANAYDGVRHDSGCPFRWGDKMIAHYQQLGIDPTTKLFIFSDGLDFDQALELCEYFAGRVKISFGIGTFLTNDLANWRNAAGVEYRPLSIVIKLAECQGRPVAKISDQPEKAMCEDPIFLANLKRRFNIELDVDALIQELRHQKRSPRHYISAA

SEQ ID NO: 77584 - protein, 346 aa, Vibrio cholerae
MPNTPLKVGVIGYGYSAKTFHLPFIDTLESLTLSAISSSQQQVVQEDWPQIAYFDSAQRLITESDVDLVIITAPNNVHFPLAKLALEHGKHVIVEKPFVTQIEQGRTLIELARQQGLLLSVFHNRRWDGDFLTVKKLIEQGQLGDVKVFESHFDRYRPVVRQRWREQAQEGGGILFDLAPHLLDQALVLFGLPQSLSADCRMMRPDATTLDYFDLQLYYPQHVVRLHANLYSPEPNVRYQVLGSLGKYVKYGLDPQEDRLKAGERPTHPQWSQEMPEQYGILYHAEGNENVITELGGYQHYFTQVVEAIRNGASNPVSAESALQSIQLIELALESSAKGQRLAVTL

SEQ ID NO: 77585 - protein, 1017 aa, Vibrio cholerae
MARLQFQLKVDGLEDESLVVRGFEGQESLSDSVWRCEPCYGFRYQVDLASALSNLTAEQFVDQTAHLTILRDGQVVQQINGIVRQLSKGDTGHRHTFYSLTLVPALERLSLRSNSRIFQQQSVPEIISILLQEMGIEDYAFALKRECAQREFCVQYRETDLQFLHRIAAEEGLVYSHLHEAQKHTLLFTDSSDSQPKLAKPVPYNALAGGEINLPYVVDLQFKTTAQVSHTELKDYSFKKPAYGFTQRTQGKDIAYQQPNYEHFDAPGRYKDDANGKAFSQIRLEYLRRDALLADAKSDEPLLLAGVRFDLQDHLDHAMNRDWLVVQANHQGTQPQALQEEGGSGATTYSNQLKLIPAHITWRARPCAKPQVDGPMIATVVGPQGEEIYCDNFGRVKVHFPWDRYSSSNEKSSCWVRVAQEWAGSQYGSMAIPRVGHEVIVSFLNGDPDQPIITGRTYHATNTAPYALPDHKTKTVLRTETHQGQGYNELSFEDQAGSEQILLHAQKDWDALIEHDHTEVIRHDQHLTVDNDRFTRIQRNQHLTVEGEVRSKIALDSSHEVGASLQHKVGQRIAVEAGKEISLKSGAKIVVEAGAELTLKAGGSFVKVDAGGVHLVGPAINLNAGGSAGSGSAYGGQLAAAPRMLAQAKPVAELVQPDIAASMQSGAARVIDVASLPTMMPSSANNTANDEPVAEEKTPERILKSDLLKPSDELEKLAKRQASAYRQGNHSDEVKLLQEALIKLGFDLGKAGADGDFGSKTKTAIEQFQKSYQPSHQTHPSYSIGAVDGIVGKGTLLALDEALMDGWVYENNIYQIWPLGKTSEKYESAGRGPGVISTGNGDYGGASYGCYQMSSNLGVVQKYIQSSKFKEFFSGLNPATKEFNVVWQDIASRYPQEFREEQHQFIKRTHYDIQIGHLRGKGLLFEHNRAAVHDLIWSTSVQFGGRTNLIFNALNGQNMESMTDKDIIILVQDYKLVNTERLFKSSPSWWSDLKKRAVSEKKALLELEIDGLEVDIK

SEQ ID NO: 77586 - protein, 156 aa, Vibrio cholerae
MKVMLSLFKRESIKGITMKKSTLLNSELSYLVATLGHTDEITICDAGLPIPDEVTRIDLALTHGVPSFLETVRVILSESQIESVIVAQEFAQVSPVLHEALYRELKAEEQLCGKPIAIQYISHEAFKQRTLQSRAVVRTGECTPYANVIFQAGVVF

SEQ ID NO: 77587 - protein, 332 aa, Vibrio cholerae
MKQGYSMSTRTMTNTTSDNRKKLLSKEWLIEQKSLIALLFLVVVVSFLNPNFFTVDNLLNILRQTSVNAIIAVGMTLVILTAGIDLSVGSVLALCGAFAATLVAMEVPVLVAVPTALLAGAALGAISGIIIAKGKVQAFIATLVTMTLLRGVTMVYTDGRPISTGFTDTADTFAWFGTGYTLGIPVPVWLMVVVFAGAWYLLNHTRFGRYVYAVGGNESATRLSGINVDRVKIGVYAICGLLAALAGIIVTSRLSSAQPTAGMGYELDAIAAVVLGGTSLMGGKGRIMGTLIGALIIGFLNNALNLLDVSSYYQMIAKAVVILLAVLVDNKK

SEQ ID NO: 77588 - protein, 294 aa, Vibrio cholerae
MRMKKLTTLISAALLSTSVSFVAQAQDTVAIVLSTLNNPFFVTMKDGAEAKAKELGYNLIVLDSQNDPSKELSNVEDLTVRGVKAILINPTDSDAVSNAIRIANRSKIPVLTLDRGASRGEVVSHIASDNVVGGEMAGHFIEAKIGSDAKVIQLEGIAGTSAARERGEGFMNAVKGSKMQLLASQPADFDRTKGLNVMENLLAANPDVQAVFAQNDEMALGALRAIQASGKSVMIVGFDGTDDGIAAVERGQLAATVAQQPDMIGAIGIETADKMLKGEKVEAYIPVALKVIAK

SEQ ID NO: 77589 - protein, 403 aa, Vibrio cholerae
MTYDYVIVGGGIVGVSTGWQLKRRYPEKSVLLIEKEAGFSRHQTGHNSGVIHAGVYYAPGSLKADFCKRGVERTLAFCAQHNIPVENCGKLLVATNEQELERMHALYDRCLQNQIDVEKLDAAQLKLAEPNIRGLGAILVKATSIVNYRLVTEKMAEAFMQLGGDVKIGTEVVGLEETPSSITLTCQQKNQRVSYQAKFLVTCSGLMADRLTKMLGLPTDFQIIPYRGEYYRLAPKHNQVVRHLIYPIPDPELPFLGVHLTRMIDGCVTVGPNAVQGFKREGYGKWNVSLRDVWEMVCFPGFWKVSAKHFKTGMVEMKNSWWKAGYLQLVRKYCPSIELTDLEPYPAGIRAQAVLSDGTLVHDFLFAESPRSLHVCNAPSPAATSAMPIGEYLCDKIAEKSLA

SEQ ID NO: 77590 - protein, 891 aa, Vibrio cholerae
MKTGLDKHTSLIPNTVSARLLPFAVLPILLFGWVFYWHQTGGNAWQVTWVPGLDLNLSFRLDGLSFLFASLITGIGALIQIYALAYMKEKAARFSFHLYLTLFMLAMLGVVVSDNILLLFIFWELTTITSYLLIGFNHDKPVSRKNALQSLLVTGAGGLALLAGLILLGLMANSYQISVIIEHADHIAQHPWFMPSLILVLLGAFTKSAQFPFHFWLPNAMAAPTPVSAYLHSATMVKAGIYLLARLSPIYASSDFWFYCLTIVGAVTALWCALLAFKQTDLKLMLAYSTNVALGKLTLLLGLGTEVALTAAVLFIFAHSFYKAALFMVVGNIDKATGTREREKLGNLKSVLLLSLIAAVIAALSKSGVAPMLGFLSKEYMYKSSVESGIAWISLVLLLINALMVALAIALLYKPFFGQATKESESHPPKAIEQKKSLWLPAMGLAIASFLLPVFALDWINQHLVIPAVMAMDPNSVPQAAKLWQGFNIPLALSGITLVLGGVLYLNYATLVTWLTRLVKPLPKAEQMFDAVLAYLATLASWQTQMLQQKRSSGYMLLFFAVLALILIYQPLPLPATFSASLFDVHFYEVAIALALIASALLCVLSTSRLLSVLALGMAGFMTTLVFMIYSAPDVAKTLLLVETLMVVFVVLLMRHVPYLSTVARHSVPRRTLNAVIASVIGASVTLILLNITAHPIDTTLSDYFAQQSVPGGHGRNIVNVILVDFRAFDTLGEVIVVVMASLVAISLLPKRTEQPQKIHSLIFATTAHIVTALMLMFSLYLLLRGHNAPGGGFIGALIAVIGFSLLLFAESPQYVRDRLHFSPLNIALFGILLSFMAGAMSVAVGLPFLTGLWWKEILPLGTPLLFDVGIYLAIIGGVMSMLLRVKEELD

SEQ ID NO: 77591 - protein, 644 aa, Vibrio cholerae
MIRRENMFKLHQMSIKQKVVLGVTLAVLASTLIVGVMAQRQAREVLEHRLVDLELPNILKLIKSDIDHEVLQLLASAQQIASNEFVQQAIATTERDPATEALLVKQLNNLRDQYRLNDASVANRKTAYYWNQNGFLRELNQQQDGWFFGFIGSGKPTMVSMFQEANGEVKMFANYQLVNGNTMSGMSKSMDDMVRLLNSFKIEDTGFVFLTNAQGEVQIHRQKEQVKSSLQQIYGSGASALLNKSGFNLISTDYQGEEVMVASIYIESMDWFLVGTVPVHEVFAELDAVAQRMMLTTLAVAAIFIFMGIFLANSIAMPINQIAKRFTDLGRGDGDLSQRIEVKGNDEIAQLSKGFNGFIEKIHQSIKDVAQTSRELQVAAEGVSRKALVTHDNSQQQRDQTIQVVTAINQMGATISEIASNAATAAETANQASGNADQGRNVVNKAKEAISRLAHDIENTGKVVEQLASTTQEIGSILDAIRGISEQTNLLALNAAIEAARAGDQGRGFAVVADEVRNLASRTASSTEEIQKMINQLQNDAKNAVSAMDAGKTVTHQGVAASDEAVQVLMSISDRIHDISDRNTQVATATEEQSTVVHTINQNIEEINAINEVTTSTAEELADASKSLRELSGRLDKLVGNFKL

SEQ ID NO: 77592 - protein, 410 aa, Vibrio cholerae
MKNLVGRFMRYVTFDTQSKPKNHHCPSSTGQKVFAQALYEELLELGLSDVSLDDHGYVMAKLPSNVNYPVPAIGFIAHMDTSPDACGKHVKPQIVEDYQGGDIALGKGDEVLSPIQYPDLHLLHGYNLITTDGTTLLGADNKAGIAEIITAMEILLADPSIPHGDISIAFTPDEEIGRGANHFDVAKFAAQWAYTIDGGPIGELEYENFNAATATVVCHGVNVHPGTAKDKMVNAMHIAAQFILMMPENETPQHTEGYQGFYHLSGATMSVAKSELKYILRDFEAIGLQARQALMQAKVAELNQQLKKGRVEVSFEQSYSNMKEKVEPHPHIIELAKQAMVACDVEPKIKPIRGGTDGARLSFMGLPCPNIFTGGYNFHGIHEFITIEGMEAAVQVIVKLAEKTALHYRQ

SEQ ID NO: 77593 - protein, 280 aa, Vibrio cholerae
MKLTLRKKLLEKVENTTETPMLILSVVYVVVALLPDIAVLSPDDLEFLDGLLWIVWGIFATELLVKIFVSPKPLQYMMQNWPDVLIVAMPFLRPLRFLRILLVLPKAWRQTKSVLRQKTFSFIGLTSLSTVLLSAAFVYLVEKGTPSPINSYADALWWAMSTITTVGYGDMYPVTGFGRGVAVFLMLTGITLFGLLTASVASFFVEDDTAKQDHLSLNLLLEKNQQLETQLNQLVETQQPRKRFHLASYRRQLAERETVRKNQKPKRRRIKLPSQDNRNA

SEQ ID NO: 77594 - protein, 276 aa, Vibrio cholerae
MEHKIREEMRVLPSIDPQFEIERRVAFIKRKLTEARCKSLVLGISGGVDSTTCGRLAQLAVEELNQQHNTTEYQFIAVRLPYGEQKDEDEAQLALSFIRPTHSVSVNIKAGVDGLHAASHHALANTGLIPSDPAKVDFIKGNVKARARMVAQYEIAGYVGGLVLGTDHSAENITGFYTKFGDGACDLAPLFGLNKRQVRLLAKTLGAPEQLVYKTPTADLEELAPQKADEAALNLTYEQIDDFLEGKAVPAEVSQRLVAIYHATQHKRQPIPTIYD

SEQ ID NO: 77595 - protein, 414 aa, Vibrio cholerae
MFLIRYCFYLEITMSASLSVAKLTFFIAILAAVGQATQTMYVPSIGYMAQEFLVSPAALQAVMACYLIPYGLSQFVYGTLSDRIGRKPIIIAGLAIYIIGSLIALFAHQYSWFLIGSFVQGLGIGCGGAMSRTLSRDCFEGAELHKVNSLISMCLIFSPLVAPVLGGYLTESFGWRSSYLFLSLFAIAVVITMMTSMVETLPATARKKEPVLRSYHYVLSDRRFQGYLICLVATFAGLAVFEAAAGVLLGGVLGLPATTVSLLFVLPIPGYLAGAWLSNVIARHWREKTAMHVGLLAILTGSLVIMLPGLLGMTTALSLIGGATIYFLGAGILFPAATTGALSPFPYHAGTGGAILGGMQNLGAGLATLFAAMFPASDQLPLGIIMLLMSVLALWGLKRVYTKQPPSDEMPIAI

SEQ ID NO: 77596 - protein, 312 aa, Vibrio cholerae
MKKLLLVLVVISFCSLFVGVGNLSLAALFQGDESAWQLLLTSRVPRLLAILLSGAGLSIAGLIMQQVSQNRFASPSTSGTIECAMLGYVLSLVLFGHGQNLWLIFGVSMLGTLVFVFFIQRIQFKNVIFVPLIGIIFGNVIDSLATFIAYKYDAIQNLSGWAVANFANLLKGDFELLYIAIPVAIFSYLYAARISAVGMGKDFATNLGLNYQQVMIIGVALVSIMSATVVMIVGQLPFLGLIVPNLVSLYYGDNLRKNIPRTAIFGAMFVLLCDLVGRVIIFPYEVPISMIISILGGSVFIALILRGQRHAG

SEQ ID NO: 77597 - protein, 358 aa, Vibrio cholerae
MITIRIYVKLSSTNREVELIMQNRTSVMENTQNQHKVLTKNGARQTVTLSRHVVKERDEQIVAQNLNQPVMAQGHFVEYVSPNGFTLHGGSSLELADCDVMTTSAPALVIILLLEGTLRFAYDDLKLELCANQHPQALMVNLEQPCIFHRRLHQGMTVRKLNIVLSPDTLQKFAQHSCPLQHFLQQDKALVPLSLNEESWQAVESLLNRRVIHTISAHIAREATVWRLVHDAVLQCPKHATSLSQHQEGQSEQWINQLLHYIDQHLHEEICLEQLAERHAMSVSNLQRKFKTRLNMTIAHYIRHRRLQLARQQLERGLVTITEAAYEAGYLHPSNFTAAFKKAFGISPQAFVELKQAG

SEQ ID NO: 77598 - protein, 230 aa, Vibrio cholerae
MYSELKQRVFNANLKLPKYGLVTFTWGNVSEIDRERGVLAIKPSGVEYDAMCAEDMVIVDLTGKVVEGKLNPSSDTATHIELYRAFPDIGGVVHTHSRSATIWAQAGIDIPALGTTHADYFYGDIPCTRKLSHSEIAGEYEKNTGLVIVEEFRHRHIDPMAVPSVIVAGHAPFSWGKNAEDAVHNAVVLEEISAMALATRSLNSGIKIQPELSDKHYLRKHGANAYYGQR

SEQ ID NO: 77599 - protein, 168 aa, Vibrio cholerae
MGLKQSLIENNSIQLQAKANNWREAIKIGTDMLIASGAITPAYHEAIIASVEQLGPYICIAPNLALPHARPENGVLRTAFALVTLQEPIYFEGEDEPVDVLITLAGSSSDEHMEGLMEVTQVLDDENSATGVDLDKLRRCRDKQQVYAVIDQALSQQASAQQELAHIA

SEQ ID NO: 77600 - protein, 586 aa, Vibrio cholerae
MEFLYDVFYIFYSQVMTKAPLLLGLVTLIGYWLLRRDATTIIKGSIKTIVGFMLVQVGAGTLVAGFKPVIEKLSQYHGLTGSVIDPYTSMMATMETMGDNYSWVGYAVLLALAINILLVLFRRYTGIRTIMLTGHIMFQQAGLIAVFYFVLGAGMWETIIYSAVLMALYWGISSNIMFKPTEEVTGGAGFSIGHQQQVASWIATKIAPKLGDKKDSVDHLQLPKWLHIFHDSIAATAIVMTVFFGIILLSFGLDNLQEMAGSTHWTIYILETGLKFAVAIQVIVAGVRMFVAELSEAFKGISERVIPNAVLAIDCAAIYAFSPNAMVFGFMWGALGQFAAVLAMLAFNAPIMIIPGFIPMFFSNATIGVFANHFGGWKAVMKICFVMGIIEVLGSAWAIHLFTQQGTEFSGWMGMADWALVFPPIMQGLSASKLFFFVLVALALVYMFFASKQLRAEEDAQGSITVSDEPEVIEAVEQALQAAQGTRPVSILAVCGNGQGSSMMMKMKIGKYLEQKGIPHVMDSCAVSDYKSKLATTDIIVSSKHLSAEMEPGEGKFVLGVQNMLNPNSFGNELLDIIHNHFVKIR

SEQ ID NO: 77601 - protein, 251 aa, Vibrio cholerae
MNEVQRHNGILSLLEENQAINVSHIIERFNVSPATARRDIAKLDELGKLRKVRNGAERIENQKRKWSPLNINSTEHYEEKSLIALKAAELCQPGDSVVINCGSTAFLLGQQLCGENVQIVTNYFPLASYLINEDHDDVIIIGGQYNRAQSIFLNPAPDSLGGYAGNWMFTSGKGLTEAGLYKTDMLTAVAEQQMLEQIDKLVVVVDSSKVGQRTGMLFCSTSKIDIVITGKNANAEVVKAIEAQGTQVILV

SEQ ID NO: 77602 - protein, 643 aa, Vibrio cholerae
MKTAGGVMTLGFKGRIYASVVILVTISLMVLGTINMLSLKREMIDSLTTETQNKLNYHVSELEFWVKSRYEAVSRGANLFTPELSDTDNLNKVRLLAEAAQITNVIAAYEDGRSYMSMDKEGGVTTNRFKFTDRDWYQQAKSRRSPFLTEIYQDQVTGKKVISAVSPILHQGQFVGALLGDFQLDDIITQVSNMRFAGGAATLTDKNAVFFASDDPNDIGRTPSQVSPSFREMEAGFHRQESGHLSFPYLGIEFDGYYKRVNLTDDMYWTLMVFVDKATALADVDVAVANAITTGIVLIGISVGVIIFIINQIYKPLLRLKVAVLDLAQGSGDLTRRLEVNGNDDLAQISEGFNRFSGNLQNMMLQISDATQIISSSIEQLSQTAKENEQMLISHSSETDQVVTAITQMSESARTVAESVTQSNQITEAASKEAQQSLVIVNNAVSTVTSLVNDVENMSESISNMNRDANKISEVLSVIGAISEQTNLLALNAAIEAARAGEQGRGFAVVADEVRALAARTQNSTTEISDMLTKLLEGTDSVVGAMERTKQQCQTTADKTSEVSGSLNMMSASVSDIDDLSTQIAAATEQQSTVAAELSRNMLSIREIVESLVVSGRQTVGATESLSHSNHELEQLVGKFKLR

SEQ ID NO: 77603 - protein, 435 aa, Vibrio cholerae
MNANLNKAYPNVSLENFFSTPLAATNDAVFAAIQAEYTRQNEQIELIASENIVSKAVMQAQGTCLTNKYAEGYPGRRYYGGCEHVDSVEQIAIERAKMLFQCQYANVQPHSGAQANGAVMLALLQPGDTIMGMSLDAGGHLTHGARPALSGKWFNAVQYGVDRQTLEINYDSVRALALEHKPKMIIAGGSAIPRTIDFAQFRSIVDEVGALLMVDMAHIAGLVATGAHPSPLPHAHVVTTTTHKTLRGPRGGMILTNSEEIHKKINSAVFPGLQGGPLMHVIAAKAVAFGEALGPEFRTYIDSVIDNAKVLAEVLQTRGCDIVTGGTDTHLMLVDLRPKGLKGNQVEQALERAGITCNKNGIPFDEEKPMITSGIRLGTPAGTSRGFGREEFKLIGEWIGDVLDGLVASPEGNPDVEQQVRKQVKALCQRFPLYQ

SEQ ID NO: 77604 - protein, 326 aa, Vibrio cholerae
MSHQLTFADGEFSNKRRQTRKELFLARMEKLLPWSQLLAVIEPFYPKAGNGRRPYPLETMFRIHCMQQWYSLSDEAMEDALYEIASMRLFAHLSLDRAIPDRTTIMNFRHLLEQHQLGRSVFEPINQWLSERGVLMKQGTLVDATIIEAPSSTKNKTNQRDPEMHQTKKGNEWHFGMKAHIGVDAKSGLTHTLVTTAANEHDLNQLSNLLHGDEEFVSGDAGYQGAHKRDELKGADVDWLIAERPGKVRALKKHPRKNKVAIHIEYLKASIRAKVEHPFRIIKCQFGFIKARYKGLMKNDNQLAMLFTLANLVKVDQLIRRQARSA

SEQ ID NO: 77605 - protein, 642 aa, Vibrio cholerae
MPIITLPDGSQRHFDNPVSTLEVAQSIGPGLAKATIAGRVNGARVDACDLIEHDASLEIITTKDEVDGLEIVRHSCAHLLGHALKQLYPNAKMAIGPTIDSGFYYDIDLEQSLSQEDLEKIEARMVELAKTKYAVVKKKVSWQEARDTFESRGESYKMEILDENVARDDRPGLYHHEEYIDMCRGPHVPHMGFCQNFKLLNIAGAYWRGNSDNKMLQRIYGTAFHDKKALQAHLTRLEEAAKRDHRKIGKQLDLFHMQQEAPGMVFWHHNGWSIFRDLEIFIRQKLNEYGYQEVKGPLMMDRVLWERSGHWDKYADAMFTTSSENREYAIKPMNCPGHIQIFNQGLKSYRDLPLRMAEFGSCHRNEPSGSLHGIMRVRGFTQDDAHIFCTEDQIQQEVTSCIKMVYDTYTTFGFQNIVVKLSTRPEKRVGSDEIWDKSEQALIDSLKAMDIPFEIQEGEGAFYGPKIEFTLYDCLDRAWQCGTVQLDFNLPTRLGATYVGESNERLIPVMIHRAILGSLERFIGILIEEYAGFFPTWLAPEQAVVVNITDKQADYAHEVAQKLQKCGIRAKADLRNEKIGFKIREHTLKRVPYMLVCGDQEMEAGEIAVRTRKGKDLGKFKLDDFIAHIQAEIASRKLNLEE

SEQ ID NO: 77606 - protein, 64 aa, Vibrio cholerae
MPKMKNNKGAAKRFKKTAGGIKYKHATKRHILTKRTTKNKRQLRPNAILPKCELAAVARMLPYA

SEQ ID NO: 77607 - protein, 117 aa, Vibrio cholerae
MPRVKRGVQARARHKKVLKQAKGYYGARSRVYRVAFQAVIKAGQYAYRDRRAKKRQFRQLWIARINAAARQNGLSYSRFINGLKKASIEIDRKILADIAVFDKAAFAVLVEKAKGAL

SEQ ID NO: 77608 - protein, 209 aa, Vibrio cholerae
MNFFTSPFSGIPLDQQVTNPNIIVGKHSYYSGYYHGHSFDDCVRYLHPERDDVDKLVIGSFCSIGSGAVFMMAGNQGHRSDWISTFPFFYQDNDNFADARDGFTRSGDTIIGHDVWIGTEAMIMPGVKIGHGAIIASRSVVTKDVAPYEVVGSNPAKHIKFRFSDVEIAMLLEMAWWNWPESWLKESMQSLCSSDIEGLYLNWQSKART

SEQ ID NO: 77609 - protein, 326 aa, Vibrio cholerae; identical to SEQ ID NO: 77604

SEQ ID NO: 77610 - protein, 222 aa, Vibrio cholerae
MSKQYDKEEYIKKFETDKSHSILLQSAFAQASDIRKFEIELYWKRATYFWALIAVAFAGFFAVASGDFKGGGQSLFLTIIASTGFVFTFAWFSANKGSKYWQENWENHLDLLEDSVTGPLYKSFLERPPESEFCKKYITGPQRYSVSKINQWVAVFTLFIWCVLVIFSLSTYKENCSVGFVFHVLIPITALALCRIMISKGKTHDGSHNPKFWLREVNVTKD

SEQ ID NO: 77611 - protein, 85 aa, Vibrio cholerae
MKVELVTSLKRQATKILADLHDTKEPVLITEHGKPSAYLIDVDDYEFMQNRLAILEGIARGERALADGKVVSHQDAKDRMSKWLK

SEQ ID NO: 77612 - protein, 155 aa, Vibrio cholerae
MNYHQYYPIDVVNGPGTRCTLFVSGCVHQCKGCYNQSTWSLSSGHRYTQEMEDKIIADLKDTRIKRRGLSLSGGDPMHPANLSAVLQLVQRVKTECPDKDIWLWTGYTLAELDDSQQALLPYIDVLVDGKFIQEQADPGLEWRGSANQVIHRFTL

SEQ ID NO: 77613 - protein, 580 aa, Vibrio cholerae
MKMKIAIVTACPSGVANSIIAAGLLQQASKTLGWEAYIECHSTVIAGHTLSEEEINKADLVILAANGKIDMQRFVGKKVYQSPITACTSDPVGYLKQAAEQATELSSEQATRCDSPATASVSAKKIVAITACPTGVAHTFMAAEALEAEATRQGHQIKVETRGSVGAKNQLTEQEIAAADLVIIAADIDVPLDRFNGKKLYKTSTGLTLKKTAQELSNAFAQAKTFSSSANSATNEKAEEKKGVYKHLMTGVSHMLPVVVAGGLIIALSFVFGIEAFKEEGTLAAALMQIGGGSAFALMIPVLAGYIAFSIADRPGLAPGLIGGMLASSTGAGFLGGIVAGFLAGYSAKFIADKVQLPQSMAALKPILIIPFIASLFTGLVMIYVVGGPMSSIMSGMTSFLNNMGSTNAILLGIVLGAMMCFDLGGPVNKAAYTFGVGLLASQTYAPMAAIMAAGMVPALGMGLATFIAKDKFEAGEREAGKASFVLGLCFISEGAIPFAAKDPMRVIPACMVGGAVTGALSMLFGAKLMAPHGGLFVLLIPNAISPVLLYLVAIAVGTAITGFGYAMLKKSAQAKAVAA

SEQ ID NO: 77614 - protein, 379 aa, Vibrio cholerae
MKFLHTSDWHLGRQFHQVSLLDDQSAVLAQLIDFLRDNPVDAVIVAGDIYDRSIPPTAAIDLLDEVVSVICGELKTPLLMIPGNHDGAKRLGFAAKQMKNSGLHIFADFEQMMQPLVLHSPQAGEVAFWGMPYHDPELVRHYYHNDITTHDAAHQFLCESILAQRNPSQRHVLISHCFVDGAMESESERPLSIGGSDRVDHRHFLPFDYVALGHLHQPQMKGAEHIRYSGSLMKYSFGEQHQNKGATLVELGQQGFISATHIPLIAPHQMRIIEGELEAILAAGATDPQADDYLLVRLLDKHAILDPMEKLRQVYPNVLHLEKPGMLIGVDQEMGKARLARGELDMFRDFFLEAKREPLSEQQEKVVIEVIARLKAEGI

SEQ ID NO: 77615 - protein, 1013 aa, Vibrio cholerae
MRPLKLILQAFGPFAGREEIDFTKLGDAPLFLINGATGAGKSSILDAICYALYGETTGSERTGDQMRCDYAAPESLTEVIFEFELAGARYQITRQPDQEIPKKRGEGMTKKSHSATLVALKSDGNELIANKPNPVAKAVVELMGLDVKQFRQVMVLPQGKFRELLTANSKEREQIFGQLFQTQLYSQIERALFERAAGIRKEKEEFDQQIKGTLSVVGLESEEQLQTELTELAPVLTHAQSQLKAEQQQWDETKAHYQAALELEQQFIRKQQLVVEIATHQEQATHIEMLRQQRQQAQKAARLTAVHQQWHQAQKNLQQAKLKVEQQQTLLQQAKAQQQQAQQASQQASLACEEVPKLNEQRITWQRAEQKLLAQENVQQAVAKAERELQLATQNALNLQQASEKLEQELQNQRLEWEQQQRQLTRLEVQKARMNQLVQQVQAREREQSLLNELQTAQQALLRFEQQHHHIQTQAEQAKLTADKLEFAWHTQRAAELALALTQNEPCPVCGSLEHPNKAQYSGDVVTKVQVEQARQQQQDWVQRQQEAFHAWQQQGFKTEQIAQNLTTLSSELTLQQVALLNELIEQQQILHSDIAALQQLNPDLLKRQIEEGEQRLAHTKMTLEKQNQNQQQAWQTLAQLQAELASLRQEIPPELSDLDTLRSAIGRVQNQIEILQKAEHTAREQWVQAQKQFASVQAAYQAAIEAHRESQRQQEETTSAWQQGLLHSGFSDESAYLAARLTDEAIVNIERQIAQYEERSAMLSGEQQALSRKLAEKNRPELEPLLVKVTQAEEKMALALQAFTQHQSRMDGLQRVAKQLADLYQKNRALEAEYQVVGTLSDIANGKTGAKVSLHRFVLGVLLDDVLLQASQRLMKMSRGRYLLKRKEERAKGNVGSGLDLMVEDSYSGKWRDVATLSGGESFMAALSLALGLSDVVQAYSGGIRLDTLFIDEGFGSLDPESLDLAIQTLIDLQQGGRTIGIISHVTELKEQIGLRLDVLATRMGSTLRLIT

SEQ ID NO: 77616 - protein, 320 aa, Vibrio cholerae
MNWHRFTQVQNVPPSQAALALGMIGLGHAWVLYYPAVGMVIRPYLAFSGALLLLPVLLKYLHWRTFINDLRHPVSGSLMAPMSMALLILCDYLAILSPFIAYPIWAAALLLHLTMMTLFFYFQLRQFKLANIVPSWFLYPVGVISSSLAGTQFGHTLFSETMVNVCIAIYFVMLPLVLYRLVFAGTLPKRARPTLAIMAAPINLTLATYLVNFAQPDPILTGALAGIAITMTLLIYLCYLRLLRLQFQPSIAAVTFPSVISAVAMQRLTEFFATDHPHWYWLHYFGFLEVTIATLLVAWVSWGYIKMYWPELFKNRSVNS

SEQ ID NO: 77617 - protein, 314 aa, Vibrio cholerae
MVNNSIQWFPGHMHKARKEIEEAIPQVDVIIEVLDARIPFSSENPLISHIRGEKPCVKVLNKRDLADPELTELWIAHLEQEKGVKAMAITTSNPQEVHKILELCRKLAPQREEIGKNIRTMIMGIPNVGKSTIINTLAGRAIAQTGNQPAVTRRQQRINLQNGIVLSDTPGILWPKVENPHSGFRLAATGAVKDTAMEYDEVAFYTVEYLAKHYPERLKERYQIDELPETDVELMEEIGRKRGALRAGARVDLHKASEILLHELRQGVLGQITLERPEMITEELQQVEIDEALKAEEKAKRKEERRKRYLRNKR

SEQ ID NO: 77618 - protein, 620 aa, Vibrio cholerae
MKPAKQTTASLAFLAMGIVYGDIGTSPLYAFKEVFFSHHPLAINPDNVLGILSLVFWAFVLIVSIKYLLLVTRADQNGEGGILTLSAIAQQSAPKPWQRIAMLLGILATGFFFGEAVITPAMSVLSAVEGIAVAQPDLAPYVLPIAMMIIVALFAVQAMGTERIGRFFAPVMLLWFLVLALLGAHAIWHAPQVLRALNPAYAVHFVLLYGQHTLFILGLVVLSVTGVEALYADMGHFGIKPIRIAWFALVMPSLLLNYFGQGAYLLTLSAPTGSTFFSLAPKAWLWPLILLATFATVIASQAVISGIFSLARQAINYGYLPPMKIAHTSEHSQGQIYVPAANMLLFVAVIFVMLRFRSSANLAAAYGIAVTAIMMISSLLLVLVARYQWQWRWPRVVTIGIVFIGMDSLLLASTSTKLMEGGWLPLLLGCVVFIVMYIWQQQRQRLLEIAGNELSVSAMIQSLEEESFQRAAGTAVYLSRSLNHVPRSLLHNIKYNKTLHERNVLMTFQYEAVPRVHPCRRAEIEQVSASFWQVVIHIGYQEEPDMAQVMHCCGLKGLYLHPNETLFLLSSERLKVQKLGMWHDLKVWFFIQMSKHALRTSERLNIPPDRLIEMGVYREM

SEQ ID NO: 77619 - protein, 497 aa, Vibrio cholerae
MVTRLNEAHKALILVALYAMVTVVGVMYRKDMIETDVAMLFLLLNILSASVLKPRNAYVMMGLSIIDYHYFLLPDYQSFRFENAQYVITYAVLAFSGIFAVNITQAQRKQIEKNKRLQQQHKKYYELACHLSALSTSEDIAQATVKFLSKEKGIVSAIALYQPQWQWVAQHADFPVAAIELPQPPLTDNTSTLVQDEQINAFTLVDRGTILGVIYFLRYPHERFASPEALRRESKIAPWVRSLLTLSLARAHAHRTLAHVEAEKQLESTRTTLLASVSHDLKTPLGAIIGSATTLTDPSLHLSTETQQELLTSIAEQGERLNRSLTKLLDITRYTASALVPKLDWVEPEELIGTVLSRLAPRLTHHKVQIESQPMLVELDSLLIEQVLINLVENAAKYTPRGSEIEIACAYQEQQFTLAVMDNGAGIPDEALPRIFDRFYRVEGNHADGTGLGLAICQVIVAAHQGSIRVHNRESGGACFTVTIPCRQYNLKELYEQ

SEQ ID NO: 77620 - protein, 189 aa, Vibrio cholerae
MKKTLMAVGLAAVMSIPFAANAADYVIDTKGAHASINFKVNHLGYSYIKGRFNKFDGEFSYDPANIAASSVVVNVDTRSLDSNHAERDKHIRSADFIDASKYSTATFKSTEVVDKGNGQLEVKGDLTLHGQTKPIVINAEFIGAGQDPWGGQRSGFAGTTRLELKDFGIQVMGASSYVDMELHVEGVQK

SEQ ID NO: 77621 - protein, 554 aa, Vibrio cholerae
MGPGEESKEQPMHLERIEIAGFRGIRRLSLTFDEITTLIGENTWGKSSLLDALSVVLPADGTLYPFTLQDFHVDYSIADAQTQNLQIILVFAANDLHEPKAGRYRKLKPLWQTDEQGAQKIIYRISASRVKYDISTQYAFLDLEGNSLTLHHSEKLAQELMSLHPVIRLKDSRRFEKSLANGNGKNARVEKRISNTWRRLMATPGHVNKGEIRSSLSAMNSLVEHYFSFKSQSRKNPRRERDSLLYAASPSEKSLSQIIHETKNKQTKLLLLGLLNAYLQGKGPKELRRCARPILIIEDPEGRLHPTHLARAWSFLDLLPMQKILTTNSSDLLGAVPLHSIRRLVRKSDRTIATSVSQRSLSRDELRRIGFHIRFHRSGALFARCWLLVEGETEVWLFNELAHQCGYNLAAEGVHIIEFAQSGLKSLIKVARAFGIDWHVVTDGDPAGKKYSATVRGLLGHDQERHRLTELPDRDIEHFLYSHGFEYFFKELVKIPHDHPIPAKKVVSKVLKKHAKPDLALAIVSHCESNGTECIPVLLRWTLKRVITMANGNT

SEQ ID NO: 77622 - protein, 318 aa, Vibrio cholerae
MSPITYLGFGLLTLTLVAVDLWQTRGGNVTIKKAAIWSIAWFLLAFVFAISLYYGWQWYAPHSSYSAEKATLSFITGYLLEKSLSVDNLFVFAIIFHQYSVPEHLRPRALLWGVIGALVLRAIMIAVGAQLLSQYHWILYVFALFLIWTGIQLARDKGEESINPLPERWIRRCFNVTKEYQGNALICKQQGQWWVTPMFIVIGVIAFMDVMFALDSIPAIFAMTQEPFLVLAANVFALLGLRSLYFVLQGMMDKFFYLKPALAFIMMFIGVKMMLVDSAWAIPTPISLCVLLVTMSTAVIASVLRERSQSKPIAEKVS

SEQ ID NO: 77623 - protein, 512 aa, Vibrio cholerae
MQIGVPREQLAGETRVAASPSSVEQLIKLGFEVCIESKAGALASFDDAAYTAAGATIGSREEIWACPLILKVNAPSDDEIALLKEGATLVSFIWPAQNPALMEKLSSKNINVLAMDAVPRISRAQALDALSSMANIAGYRAVVEAAHEFGRFFTGQITAAGKVSPAKVFVAGAGVAGLAAIGAAGSLGAIVRAFDVRPEVKEQVQSMGAEFLEVNFQETAGSGDGYAKEMSDEFNRKAAELYAAQAKDVDIIITTALIPGKPAPKLITKEMVDSMKAGSVIVDLAAANGGNCEYTVKDQVITTDNGVKVIGYTDMVGRLPTQSSQLYATNLVNLLKLLCKEKDGNIDINFEDVVLRGVTVVKAGEITWPAPPIQVSAQPQQKAKVQPTKAQKKEPEPTSPVKKLVGLAVGVGLFAWVASVAPAAFLGHFTVFVLACVVGYYVVWNVTHALHTPLMSVTNAISGIIVVGALLQIGQGSGIVTFLAFIAVLIASINIFGGFTVTKRMLEMFRKN

SEQ ID NO: 77624 - protein, 334 aa, Vibrio cholerae
MTKTTILLLCGGGSSEHEISLVSANYIQQQLELTPEFHVIRVEMKKEGWFSEQGALVYLDTNSATLNSDKASYPIDFVVPCIHGFPGETGDIQSMLELAGIPYLGCGPEASANSFNKITSKLWYDALDIPNTPYLFLTQNTPSSIDKAKQAFGHWGSIFVKAARQGSSVGCYKVTTEDQIAPAIEAAFGFSEQVLVEQAVKPRELEVSAYEMNGKLYISKPGEVIAPEGTFYSYEEKYSANSHARTVLEAENLTEKHKELIQTYAERVFIHMKLRHLSRIDFFLTQEGQIYLNEVNTFPGMTPISMFPKMLEHNGHRFSEFLVQCVTNTLVNAK

SEQ ID NO: 77625 - protein, 698 aa, Vibrio cholerae
MQVVQMYKKSLLSSAIMLALVPSAYADDYASFDEVVVSTTRLNTQITDTAASVAVINASDIEQQMAEDIEGLFKYTPGVTLTTNSRQGVQGINIRGIEGNRIKVIVDGVAQPNQFDSGNSFLNSSRVDIDTDMVKSVEIVKGAASSLQGSDAIGGIVAFETKDPADILKGRNMGGYAKLNYSSSDKTFSESIALANKSGDLESLVAYTRRDGQEIQNFGSPDQQDNNANNLLVKLQYQLNPKHRLEFSGNYIRNKNDLENLEFSGYKNASGTDETTQYQLGIKHIWDAEFSLADRITWQFDVVGKEETGITDRTSKSNGNIQKKDYLYSDKGFSFDSQLDKSFMVSNTEHYIVYGFSLSDKDIENTNQEFNSIGKNNVIFYIPNASEKRYGFFIQDEIAFDNLIVTPGIRFDSFETKPGDTSANPSLNDASEYKKYSDSALTARLGTVYKLNQENRLFAQISQGFRAPDFQELYYSFGNPAHGYVFKPNPNLEAEDSVSYELGWRYNADSVSNELSIFYSDYDNFIDSQIVSGSFKTRDAVHQSINIDKATIKGIELSNQFFWDRFMPIVGFSSRIAAAYTEGKDGNGKPLNSVSPWNAVTGINYDSENNWGTAVNLTYTAKKKASEINGDYQPISSATVIDVTAYYKPIKDLTLRAGVFNLTDEEYYNWNDVRGLPSEDKDKTQAKRNFGITAKYEF

SEQ ID NO: 77626 - protein, 565 aa, Vibrio cholerae
MSSPRLRVQFETLFEHFQGQDVETQLEDVTDILFCTRRNARIVLNKMEEEGWIEWHPAAGRGKLSQLIFKRSRADVSENLARRYLNEGKIGQAFAVLDQDAAKLTQVIESYLGVQHQEGLQVVRLPYYRQLSMLNPQKPMRRSEQHIARQVFSGLTRLDEEEQLQPDLAHAWQALSDTHWRFYLRPGVRFHNGNLLTTELIVQNLWQLRLLNLFAHIDRVDSPYPWAVDVHLQKPDTRLPLLLAEACAKILPAESDRNPDFDLMPVGTGPYKVVLNDEKRLVLQAFDGYFGFRPLLDRVEVWVIDEVHSSMVFPSLSNPMKTARGSSTEEVELDPGCTYLLLNRRNGVAKDEHWARYLTDKLNALNLFRLLPEEKIIELGVLPAYGLKPGWYHHSAAAQRTLPPESKELTIAYHAQHPMFPTVANAIKQLLSQDGITVNVIKYEHTVVETENVDIWIKPMGIANHRDDALAGWLLNYSDIEFLSKGEDFNQWVSLIDAWRADSSALFPAKELGKSLVEKHQLIPMFHCWLGISKDQCGALQNAKCNALGWFDFSQVWVKPDLSEH

SEQ ID NO: 77627 - protein, 611 aa, Vibrio cholerae
MLREKAMRSWKPIALGVTLALSSQFSWAAVIETTRLVGFGEAKYPENFTHFDYVNPQAPKYGKVTFGELGTYDNFNRFASRGVAAANTAELYDPLMFSPADEIDSYYPLIASKIRYSDDFTWLEIDLNPNARFHDGKPITAQDVEFSFEKFMAEGVPQYRVYYQDVKSVKAIAERTVRIEMKQPNREQLFSLAQSTRVLPKHYWQYKNLAEPLNEPPVGSGAYQIVDFKPGQSVTYKLNPDYWAKDLPVNVGRNNFAQIQYDYYRDDTVMLEAFKAGEFDLREENQAKFWATSYTGRNFDQGLIKKEEIAHQAPASTQGFIFNTQRPVFQDVRVREALNYALDFEWMNKNLFYDQYQRTRSYFQNTEYEAQGLPNAAELAVLTPYKEQLPARVFTETYQPSVTDGSGRIRTQMREAFALLKEAGWELKNKVMTNVKTGEPLSFELLIYSPTTERIAIPLQKNLQLMGIEMKIRTVDTTQYTKRLRDRDFDMISHGFSANPYPSPNLLIVWNSNYMDSSYNSAGANHPVIDALTEQIAKSQQDTEKLRALGSALDRVLQWNFYIIPQWHLSMYRVAMWDKFSRPSVLPKYSLGLDTWWIDQEKAARLPEKRR

SEQ ID NO: 77628 - protein, 254 aa, Vibrio cholerae
MMVDILSDAEMLRYNRQIILKAFDFEGQEKLKQSTVLILGAGGLGCASGQYLATAGIGHITLVDDDVVELSNLQRQVLHHDADIGRAKVDSAADSLRLLNPHLQVETIQARLSDDELDALIARHDLVLDACDNVGTRNQLNRLCFKHKTPLVSGAAIRMEGQVSVFTYQDPAQPCYQCLSALFGSSALSCVEAGIMAPVVGIIGAVQAMETIKVLTELGTPKQGKILILDAMSMSWREMNLMQLPQCPVCHPQS

SEQ ID NO: 77629 - protein, 331 aa, Vibrio cholerae
MSQIPEISVESTDLLTEIAVSYYQDGATQEEISKKYTISRAKVGRLLKQARDEGIVEITVKYHPVFSAKIEQRLIERFGVRRALIALDQPNDEAQRQQVAGLVSNYLTSTLKNGMVVTVGQGRNVSAVAHHVGVITPRDCKFVCSIGGIHPRGGMFNADHICRQLAKKYGGSSETLYAPAYAENPEQKRVFMQNSTVKQTLDLARKADIALVGIGDMSENSYMVDLGWFTPEEVVQSRLNQGVVGDFAGHDFFDVHGRIANTVMNDRVIGLGIDEFRPIAEVIAIAAENSKPLALLGALRTGAIDVIATSVSNALTVLNLDEQMQTALSAS

SEQ ID NO: 77630 - protein, 316 aa, Vibrio cholerae
MSNKLAQLRKLTTVVADTGEIDAIKKYQPEDATTNPSLILKAAQIAEYAPLIDQAIAYAKTQSNDKAQQVQDTCDMLAVNIGKEILKTIPGRISTEVDARLSYDTERSVAKARQLVKMYNDAGISNDRILIKLASTWEGIRAAEILEKEGINCNLTLLFSFAQARACAEAGVFLISPFVGRIMDWYKAKEGRDFAASEDPGVLSVTKIYNYYKEHGYKTVVMGASFRNIGEILELAGCDRLTIAPSLLAELEAAEGELVAKLVDSKGSKARPAPMTHSEFLWEHNLDAMAVEKLAEGIRNFAVDQGKLEAMIAAKL

SEQ ID NO: 77631 - protein, 680 aa, Vibrio cholerae
MLNALRSTSFIEMSNTMNRKQLANAIRALSMDGVQKANSGHPGAPMGMADIAEVLWRSHLNHNPQNPNWADRDRFVLSNGHGSMLIYSLLHLSGYELSIDDLKNFRQLHSKTPGHPEYGYAPGIETTTGPLGQGITNAVGMAIAEKALAAQFNKPGHDIVDHFTYVFMGDGCLMEGISHEACSLAGTLGLGKLIAFWDDNGISIDGHVEGWFSDDTPKRFEAYGWHVIPAVDGHDADAINAAIEAAKAETSRPTLICTKTIIGFGSPNKAGSHDCHGAPLGNDEIKAAREFLGWEYAPFEIPTDIYAAWDAKQAGASKEAAWDEKFAAYAKAYPAEAAEYKRRVAGELPANWEAATSEIIANLQANPANIASRKASQNALEAFGKLLPEFMGGSADLAPSNLTMWSGSKSLTAEDASGNYIHYGVREFGMTAIINGIALHGGFVPYGATFLMFMEYARNAMRMAALMKVQNIQVYTHDSIGLGEDGPTHQPVEQIASLRMTPNMSTWRPCDQVESAVAWKLAIERKDAPSALIFSRQNLAQQPRSAEQVANIAKGGYILKDCAGQPELILIATGSEVELAVAAYEQLSAEGKAVRVVSMPSTDAFDKQDAAYREAVLPAAVTKRIAIEAGIADFWYKYVGFGGRIIGMTSFGESAPAGELFKLFGFTTENVVKQAKELLA

SEQ ID NO: 77632 - protein, 105 aa, Vibrio cholerae
MPEPTTIKIEMDEMKKNAEEVAELLRVMAHPERLMVLCQLTQSEMGVGQLQQGSTLSQSAFSQHLTVLRKHGIIQARKESQQVFYRLADSRITALIQSLQNVFCR

SEQ ID NO: 77633 - protein, 431 aa, Vibrio cholerae
MTTKKHMSEVPMIQRVAAYLAILVGYFFYCYNFVIIDYVRPYIVEAYEGISLSDTAQFYTWQSVGALIGALSCAWFAGRFGKKYTLITITALNGGATIVNMMFTDYATWAAMRFIIGLSLGGYFTVAVSLMIGLFTPTVRGKLTAFASSMFSVALMVMGAYAAFISSIDAPWESLMWVGGIPPLAAAFAMVFVLPSDKNVIAYGEEDSSANTGQNTPAKKGSWGEMLSKPYRLLTITCLLLAGLNFYGFQFFSGFVTTYLKEVRQFDGATIGVIFSISAFGSLFGAWVWGAVADKFGRKVNAFGFILAGIMASIFFIAPSDLMIGSLNMLAILGLIYNFGLSSSAVWGGYFSELFPAHLRSYGAALFHGGRIIGMWAPMVLIFIKERTDLQTAMWGSPIVWIVAGLLWLSLPETLKGGLFDKRKSNQPANA

SEQ ID NO: 77634 - protein, 583 aa, Vibrio cholerae
MVINQRETALFTPVRHSLTRTMAKAMLLILFLSALTTGVAIVTLASSLNDAEAVNVSGSMRMQSYRLAYDIQTQSHDYKAHIFLFENSLYSPSMLALLDWTVPSDIQQDYYQLIERWHELKKVLNSDQKAQYLDQVAPFVSLVDGFVLKLQRFSERKLIALAAVGSFGLGGIFAVSLFVVYYIREQVVRPLNAMVDASEKIKNRNFDVMLEETSSTEMGILSRTFNSMAGDLGKLYRGLEHAVNEKTNKLQMANQSLQVLYHSSQELTASRITASNFQTILRHWVALEGICALRLEIEEEAGKPLILQEGKPSGAVMLQTPLTLDGHHLGFLYWEAGSPEPDRALIDNFALILSRAIYYNQAQRQAEQLLLMEERATIARELHDSLAQSLSYLKIQLTLLKRSVTPLKSDGDLSKTENIIREIDKGLSDAYTQLRELLTTFRLTLTEGSFGQSLLGMLTQLSGQTDAKIELNNALSSIALDAHQQVHLVQLIREATINAIKHAKATKIKVNCQEQQGRVQVTIEDDGVGFDLQDHKINHYGMSIMQERAARLRGELKVESAPGKGCKVVLTYQQSEEKNKNEL

SEQ ID NO: 77635 - protein, 829 aa, Vibrio cholerae
MKMTRRAFVKANAAASAAAVAGITLPASATNLIASSDQTAIHWDKAPCRFCGTGCSVLVGTQDGRVVATQGDPEAPVNKGLNCIKGYFLSKIMYGQDRLKTPLLRMKDGQYHKDGEFTPVSWDTAFDVMAEKWKASLKTKGPTSVGMFGSGQWTVMEGYAAVKLMKAGFRSNNIDPNARHCMASAVVGFMRTFGIDEPMGCYDDFEHADAFVLWGSNMAEMHPVLWTRITDRRLSHPHVKVNVLSTYYHRSFELADHGYIFHPQSDLAIANFIANYIIQNDAVNWDFVNKHTHFKQAVTDIGYGLRDDHPLQKKAKNANSGDVSDISFEEYKKSVAPYTVEKASEISGVSPDKLITLAKQYADPNTKVMSLWTMGMNQHTRGVWMQSLVYNLHLLTGKIATPGNSPFSLTGQPSACGTAREVGTFAHRLPADMVVANPKHRAIAEKVWKLPEGTIPEKPGFHAVQQDRMLKDGVLNCYWVQCNNNMQAGPNINEERLPGYRNPENFIVVSDAYPTVTAQAADLVLPTAMWVEKEGAYGNAERRTQVWYQQVKTVGESHSDSWQVIEFSKRFKVEDVWPEELLAKAPQYRGKTLYDVLFKNGQVDKFPLSEARELNDDAHHFGFYIQKGLFEEYAEFGRGHGHDLAPYDVYHQVRGLRWPVVDGKETKWRFKEGSDPYAKAGSGWDFYGKPDGKAWIISSPYEAPPEMPNEEYDLWLCTGRVLEHWHTGTMTRRVPELYKAVPDALCFMHHEDAQARGLRRGDEVLISNSRGEVRVRVETRGRNKPPKGLVFVPFFDARILVNKLILDATDPLSKQTDFKKCPVKITKVA

SEQ ID NO: 77636 - protein, 700 aa, Vibrio cholerae
MTMHEPSQALKLTLHQPVKTDPVFYWLAAVLFSFILLPSFALDYGLFESTPDEFYAAMGWSEPNISWFWFSLPLLLAFRPRQAQGRQSTNRHYLDIAYSSFCMLAILLSAWLSGKGLGYSSIILFTALGAIMTLAFARLEYLGGDHFVIGSLISIILLIVIFIVYPSIAIFLPMFKDDMGNWTAWQFMTILSQSHTLTVIYNSIALGIAVGVGATFFGLIFAIYTTRIAKRSAFIARVFSILPIVTPPFIVGLGVTLMLGRSGYITELMVDGFGLQKTNWLYGFTGIWLAQVLAFAPMSFMILDGALKSLHPSLEEASYTLKANRYQTFFGIIMPLLKPALANSFLIIFVQSLADFSNPLVLGGSFDVLATQIYFYIAGAQLDYASASTLGSVLLLFSLAIFVVQYLWIGQRSYVTISGKAYRGDVQEMPASLKLGVTVTLYAWMIFNVLLYGSIFFGSFTVNWGVDYTLTFKNYLNLFGNGMSDGAWPSLITTMIYAGVAAPITALFGLLIAYVVVRQQFYGKKVIEFSTMLCFAVPGTVAGVSYILAFNDAPIYLTGTAAIVVISMVMRNVPVGIRSGIAGLGQLDKSLDEASLSLRASSLQTIRYIILPLLRPAILSTLVYSFVRAMTTVSAIIFLVTPETRVATSYILNRVEDGEYGIAIAYGSVLIVVMLAIILLFDLLVGEARVSRSKATNQDS

SEQ ID NO: 77637 - protein, 401 aa, Vibrio cholerae
MEKIYIVGAKRSAIGAFGGSLKECSAGALAGQVIQAALEAAQLKPEAVDEVIVGNVVSAGQGMGVGRQAALAAGVPQSVPAYSINMVCGSGMKSVMDAVAHIKAGDASVVVAAGVEVMSQIPFVTPASLRDGQKMGAFEVKDLLIHDGLTDVFNQYHMGVTAENIAKQYDIARQTQDEFALASQMKATAAIEAGHFKREIVPISVKKRRETVVFDTDEYPKPTTTLAALQGLRAAFDAQGTVTAGNASGINDGASAVIIASESAVKKLGLTPIAEIMSYAQTGLDPKVMGLGPVSAVTQALAKAELSITQVDLFELNEAFAAQALGVVYGLAEQHAIQPEAILEKANVNGGAIALGHPLGASGNRILVTLLHELQRRQKHYGVASLCVGGGMGTAIVIKTV

SEQ ID NO: 77638 - protein, 1020 aa, Vibrio cholerae
MQTQIWHEVIRWRTGVNTAQYSPIRHAEEVNKKVFPMRLAKASIGRKLLFSFSAMALLVLLSALIGVLGFSLVAKTERDVVNNAIPSMIEARQVAELSHQIIASVQTLSNAKNEQEHQAAGQKVFSQLETLLTHIQQLGEEAFDSVLLDRLEQDVQNVIDTLAQLGRRVEHRLTLESQLSTSVKEMRKLAQELEQLTRTQVLNTSTIAIANVTHIYDLLQKQQQAQVYQALDNLVEVDLDLAERLHELHLLAFKVLNEIEETQTVTDLERILALDSEFAANLSIMQRRVQAVEDPTRSKQMVSLLRGLEKRRIVFELLKQRYSNEQAAQQLLHDTLTQFAKLNNTVNQLVDASNQVTTAAVSKLSNTLYDAQLILTVLGLLGLVIVVWIVWKVVYRSVIQRLDQHTAALLSVAKGQLDVDVSTQGNDELGQMGQAIAHARDTAKALKVVAESEVLAKRELQQHKEHLEELVEQRTCQLSEMNHKLNQEVLNHAKARQQAEQASRAKSAFLATMSHEIRTPMNGVLGTARLLQDTTLTSTQQHYVQVINRSGRSLLAILNDVLDYSKIEAGHLEIHHTHFDLYRLVSETHELMQSRAREKGITLTYHIDEDVTQYWQGDEIRIGQVLNNLVGNGIKFTDQGEVRIRIRLAPDGQGIRFAVEDSGIGIAEEEQATLFDAFTQADAGRRKLGGTGLGLAISRKLVQAMGGELQLASQLGQGSCFWFTLPLPVGEPVETPALAVDDVPVANVLLVEDNEVNCLVAQGFLTSLGHQVTLAKSVQEAKLCFQQQRFDIALLDIHLPDGNGVDLLRDLRQMEDSIHNAVIPFIAVSAHVFNEEVAGYLAAGFDGYLPKPLVKEQLAAMLRQQLTAKSGDDADMRDKAESHDTSSIFDNGQPQGEPSPEAQAVRKEWVAVMDHAKFEQDVQILGVEKMREIVGYFEQGCAEFFALCEAERDNDAQIKSQAHKLKGSAGALWLTQLYQLCQQIEKADSPAAAYQQTPLVDAVENAKQALRNALDLLSKE

SEQ ID NO: 77639 - protein, 349 aa, Vibrio cholerae
MADWAILCSVYSGSPTNNLMPNLRLHSFSLISALLLLSALPAAAAEKLCALYPHLKDSYWLSVNYGMVEEARKLNLNLRVMEAGGYPNHHKQQQQIALCVRWGADAILLGTVSPELYQDDLAHYTRSVPVFATVNQLRLNEQQQEHLKGEVGVDWYWMGFYAGEYLARKHPKGSGEIKIVVLPGPASSGGTKPVLQGLEEAISHSDVRITEILWADNDKELQRNLIQQALEQPDVRYLVGSAVAIEAAISELRSLNKSDQIGLIATYLSHGVYRGLLRGRVEFAPTDQMVEQGRLSVRQAAAFLRNKPYAIQQAPKIEALTPQHLERKIIADSLSPSEYRPVFQVKAVE

SEQ ID NO: 77640 - protein, 118 aa, Vibrio cholerae
MKHSRTGFSRIIYATGYSMKGFAAAWKNEAAFRQEVTLALPLIALSFFLPVSTIEQVLMVGSLVLILIAELLNSAIEAVVDRIGAERHELSGRAKDIGSAAVFVSLCFAAFTWTWILL

SEQ ID NO: 77641 - protein, 725 aa, Vibrio cholerae
MCCAVPKINQLRLYWANKTVNYSVLILLTLLGVVIPAWYYQLNTWITPLILGVIAAALADRDDRFSGRLKSIILTLICFAIAAFSIEILFQTPWLFALGLFTSSFGFIMLGAMGARYASIAFASLLVAVYTMLGAHQSTNIWFQPLLLLSGSAWYYLMSMLWHAFWPMQPVQQNLANVFLQLANYLEAKSTLFHPVSNMIPQPHRIIEANLNAATVNALNQCKAVFLTRSKRGHVDSASDRFLNIYFLAQDIHERVSSSHYRYQELADHFGRSDILFRFKYLLETQAKACRDIAQSIRLGHSYQHDSASIVALDELQLSLSYLRQQERRDWKSLLGQLGYLFNNLATVEKQLNNVSNPDVAKPEEGVLDDTEAHTLGSMWQRIRANLNKDSLLFRHALRLSITLTLGYAIIQGFGIERGYWILLTTLFVCQPNYAATKQKLTARIIGTLAGLLIGVPLLTFFPSQESQLVFIVFSGVMFFAFRLNNYGYATGFITLLVLFCFNQLGEGYAVVLPRLADTLIGCALAVAAVVLILPDWQSKRLHKVMAEAIDANKQYLAQIIGQYRIGKKDSLSYRIARRHAHNQDAALSAAVTNMLAEPGRYRAAADESFRFLTLNHALLSYISALGAHRTRLDDETVHQLVLDSHRVIHQHLDLLHQQLSNHCEECDTSGIDSSGLEKRLAEWREDDEGSARMVLQQLHLIYRMLPELHTLASKFAVKVDSQSD

SEQ ID NO: 77642 - protein, 366 aa, Vibrio cholerae
MSEVILQLQKRLGETQLDVDLRLPAVGICAIFGRSGAGKTSLINLISGLTTPDVGEIHLAGRTLFSSSQGIQLPIEQRKIGYVFQDARLFPHYTVRGNLNYGVTDADPEYFASVTRLLALEPLLVRYPRDLSGGEKQRVAIGRALLSKPDLLLMDEPLASLDMPRKKEVMPFLENLAQHFRLPILYVSHSMQEILRLADHLVVLEQGKVLSAGPIEQVWSSKAMRPWQSFSEQSTLFSATVAKHHQTYGLTQVRLAEDVWLWVQQVEADVGSSVRMQVRANDVSIALDKPTASSIRNILPARIVAIEHQQPSKKSVSLKLELAPHCYLWAVVTEWAHAELALEVGMPVFAQIKGVSVAQRDVILTN

SEQ ID NO: 77643 - protein, 254 aa, Vibrio cholerae
MPMLTRILLLLCVALNAPLASAKETLHIYAASSMTNAVNALVADYSQQHDVKLVTVYGGSSSLARQIEAGAPADLFISANEEWANYLVEKGLVKPNKVVTLAANSLVLIRPTAQPVASFELQDAAAWQTALADSRLAVAQVDAVPAGMYAKQALQHAGVWPELESRLAQTNNVRLALALVERGESPLGIVYKTDALLSDKVTIVTAFSAQSHQPIRYPLAQLNDKAASAEWVAYLRSDAAQQILQRFGFESVSE

SEQ ID NO: 77644 - protein, 484 aa, Vibrio cholerae
MKKWLMVQGTTSDAGKSVLVAGLCRVLARRGIQVCPFKPQNMALNSAVTPDGGEIGRAQAVQAQACGIAPSVHMNPVLLKPNSDTGAQVILQGRALSNMEANAYHDYKKVAMDTVMDSFQRLQQEYEAIMIEGAGSPAEINLRENDIANMGFAEKADVPVIIVADIDRGGVFAHLYGTLALLSESEQARVKGFVINRFRGDIGLLQSGLDWLEQKTGKPVIGVLPYLHGFDLEAEDAIAAQQNLSADRQLRVAVPVFTRISNHTDFDPLRLNPNIDFRYVGQGESLSGADLIILPGSKSTRADLAYLRSQGWDKEILRHLRLGGKVMGICGGFQMLGEWVHDPLGIEGEAGSSEGLGLFAMQTELTAEKRLTNVKGHLTLDGQTVAAQGYEIHAGHSSWAADQKSPIILSDGSLDGLVSDCNQGFGTYLHGIFDRPETALRICQWAGAKEIEAYDHRAAQERAIDRIADAIEQHLDLTLLWPDL

SEQ ID NO: 77645 - protein, 505 aa, Vibrio cholerae
MTEQKYVVALDQGTTSSRAVVLDHDANIVSVSQREFTQIYPQAGWVEHDPMEIYATQSSTLVEALGKAGIRSDEVAAIGITNQRETTVVWNKETGKPVYNAIVWQCRRTAAICEELKERGLESYIRDNTGLVLDPYFSGTKIKWILDNVEGAREQAEAGQLLFGTVDTWLVWKMTQGRVHVTDYTNASRTMLFNINTLQWDEKILAEFNIPLSMMPEVKKSSEVYGQTNIGGKGGTRIPIAGIAGDQQAALYGQMCVQAGQAKNTYGTGCFLLMNTGQEKVTSHNGLLTTLACGPRGEPAYALEGAVFMGGASIQWLRDELKLISDARDSEYFATKVDTSNGVYVVPAFTGLGAPYWDAYARGTIVGLTRGVNSNHIIRATLESIAYQTRDVLDAMQADSGIKLSALRVDGGAVANNFLMQFQADVLDTEVHRPKVTEVTALGAAYLAGLAVGFWDGLEELQGKAEIDRSFKPHHDEEKRQRRYKGWKRAVKCAQAWAVLHNEEE

SEQ ID NO: 77646 - protein, 413 aa, Vibrio cholerae
MNHAFIHSAPQNTTFDQCIKCTVCTVYCPVAKANPNYPGPKQCGPDGERLRIKSAEYYDDALKLCTNCKRCETACPSGVKIGDMIAVARGKYGKKPLNPKLVRDFVLSHTDLFGSIATPFAPLVNAATSLPLVKKLMHKTIGVHDHKTLPKYSHGTFRRWFKQNCTSQPLYQRQVAYFHGCYVNYNHPQLGKDFVRVMNAMNIGVRLLDSEKCCGVPLIANGFHNKARKNALHNVKHLTAMVNDYHAPVLSTSSTCSFTLQQEYPHVLGVDNSQVVDQIHYVTRFLLKEFMSGNAPKMKPVHKKVVYHTPCHLERSGNVMFTIELLKMVPGLELVVLDSECCGLAGTYGFKEENYEVSKKIGSHLFDAIQTSDADYAVTDCETCKWQIEENAHLETIHPVSLLAMALIDEPSA

SEQ ID NO: 77647 - protein, 229 aa, Vibrio cholerae
MVLTGYSLSLVQASWMTLQIALASLLVGLLLALVFAGGEMAKLKLIKWPTTLLVTVIRGLPELLVVLFIYFGSTQVLFFITGEFIEISPFISGVIALSLIFASYASQTLRGALKAVGRGQREAASALGIPPSHAFIRIVLPQAVRHALPGLMNQWLVLLKDTALVSLIGVTDLLKQAQLTSAATHEAFTWYATAAVVYLVITLITQRVVKVIDNKFSIQGMSHSQGASA

SEQ ID NO: 77648 - protein, 246 aa, Vibrio cholerae
MSKRTIQLNCDMGESFGVWTMGADEEVMPWIDMANIACGFHASDPHVMSRTIDLALEHEVMIGAHPSYPDLQGFGRRSLAMNEQEVSEIILYQVGALKALCESKNGQLSYVKPHGALYNDMMSDPSIFRAVVDAVSCFNLPLMVLASANNQDYLDIADRFDVPLLFEAFADRTYLANGKLTPRSQPNAVLSSEEAILNQVRQIARYGKVTSSDGFVIPIEADTLCVHGDNPNAVSLIARIRAALDE

SEQ ID NO: 77649 - protein, 388 aa, Vibrio cholerae
MKIAIAGTGYVGLSNGILLAQHNEVVALDIVVSRVEQLNDKISPIADPEIESFLQHQPLNFRATCDKRDAYQDAQFVVIATPTDYDPQTNHFDTRTVEAVIDDVLAINPQAIMVIKSTVPVGYTKRIKQRLCCNNLIFSPEFLREGRALYDNLYPSRIIVGEKSERGQAFATLLAQGAKKMDIPILLTHSTEAEAVKLFSNTYLAMRVSFFNELDTYAETHGLDTKQIIEGVGLDPRIGNHYNNPSFGYGGYCLPKDTRQLLRNFEDVPNNLIRAIVDANTTRKDHIAFSILNRNPKVVGIYRLIMKSGSDNFRASSILGIMKRIKAQGVEVVIYEPVLNESTFYGSPVIRDLAQFKAMAEVIVTNRRVAELEDVAEKIYTRDLFGQD

SEQ ID NO: 77650 - protein, 815 aa, Vibrio cholerae
MKALPPASLNRRLLRWSLSEIRHGQLWPVTVALTLIIASIFALTALAQRMEQVIVKQGRDALTADTVFVSGNPLPESLLTLTAQQASQTSQMTRFATMAFSDQGMQLVTVKAVDSAYPLRGEMRLSDGQQTFNHVASNQLWLEPRVKDQLGVDIGDNVTIGDADFVVSGEVLEEPGLSFNPFQQMPSVYIHASDVDKTGAIQPGSRVQFSLFMTGDDSAIESIKQQVSLTASDRWRDQESGSRTNEVFERTQQYLSLTVAIVILMAATTLVLTCQHYVSTRTHTIAMLKSLGASRRWLRRWLALQVGLLLVFAVVLGSVIGVGLESLLRLPLKDLLPDPLPSYGLRPLWIALASSFLIAVPALGIPLGRLLSVSAVAVMQPVTAQTRWQRNLLLIMVPIVPLLLVYWQNQLIWIVLIGIVVLFAMLAVVSVLVTRLLAKLPLNPAMALALSRINRSGAASGLQFGALALSLMLLAIIWLVRTDLLSDWQRTLPENAPNAFALNISESEKASYLAALDTASIERSAAYPIMRGRLTHINGQEAKQYAQNGEESSDALRRELNLTWAEQLPDYNPILQGEWQSQNGVSVEQEVASDLGLKLGDTLTFMINSQTVSAQVNTIRQVEWREMKPNFYFIFSPDVVQNLPVSYLISFRIQPEHDALLGQLSRQHPTVSLMDIRTMGAKIQALLTQIVWSVTVLAALGVLAGVLLIFTLLRLSLSQRQQEIRLYRTLGASRRRVMHTIWAEYGVMALVGGLVASVSADAVVAAVMKWGFSLTPSLHMALWFVLPALTFCTLAAVVSSLLKRLLAPVNKAFSD

SEQ ID NO: 77651 - protein, 225 aa, Vibrio cholerae
MQTSIISAQSLSKLVSTNQEHLTILKQVNLSIQAGESVAIVGASGAGKSTLMTLLAGLDTPSEGEVYLLGKPLSQLDDEARAALRSESVGFVFQSFLLIPSLSALENVTLPCLLKGEAEDRERAQKLLKAVGLEHRMHHSPAQLSGGEQQRVAIARAFMISPQVLFADEPTGNLDQETAAKVIDLLFELNREHGTTLVLVTHDPKLAQRCQRRFFMQAGELEERV

SEQ ID NO: 77652 - protein, 215 aa, Vibrio cholerae
METNLDSDCAEMMDVCMTRLLSFLFVVLFSAAASSKTLLVLGDSLSAGYEMPIEQAWPSLLAEELVEQGQTVTVVNGSISGDTTGNGLARLPSLLSQHQPDTVLIELGANDGLRGFPPQTVTHNLTTMIEQIQAKNAKVILMQIRIPPNYGKRYSDAFYQIYPSLAEQFSIPLIPFFLEQVILKPEWMMADGLHPKPEAQPWIAKFVAEHLAAHL

SEQ ID NO: 77653 - protein, 434 aa, Vibrio cholerae
MKFPGQRKSKHYFPTHARDPLVNQIQQTPKLHRPTIVGVGQTIVDIEARVDDEFLTRYDLSKGHSLVLEESKADALYHELVERGLITHQYPGDTIGNTLHNYSVLADSKSVLLGVMSKNIEVGSYAYRYLCRTSARMNLNHLQTVDGPIGRCYTLISEDGERTFAINEGHMNKLRPDSIPEEVFDKASALVVSSYLMRGKPEDPMPQAVQRAIEIAKARSIPVVLTLGTKYVIEGNAEWWQNYMKEHVTVVAMNEEEGAALTGERDPLLAADKALQWVDLVLCTAGPVGLYMAGYIDESAKRETELPLLPGNIPEFNKYEFSRAMRKEDCRIPLKVYSHIGPYLGGPLEIKNTNGAGDGALSALLHDMAANAYHQRNVPNSAKHDQPYLTYSSLSQVCKYANRVSYEVLTQHSPRLSRALPEREDSLEEAYWDR

SEQ ID NO: 77654 - protein, 657 aa, Vibrio cholerae
MTTLNKLKLFFGPLYPIVCAVFALLVIFALSRLGLAMWHFDRVTNADGWIRIFTSGLRVDFASICYLFILPALLTSLISGEHWLGRIWNWILRLWITAGLWIVVYMEVATPPFIIEYDLRPNRLFVEYLIYPKEVFGMLWSGYKLELFIGLVVSVLTVVLGWRWSKTLVSNLHYPKWYWRPVIAVLVVTVGVLGARSSLGHRPMNPAMVSFSSDPLMNDLALNSAYSVIFAAKQMGSEANAFEFYPKMDKQLVIDQVRASMTVAPEDFISDDKPSLANHVATYQGAPKNIVILLMESHGARYVKSLGGIDVSPNMDKLINEGWAFTRMYATGTRSVRGIEAVTTGFSPTPARSVVKLGKSQNNFFSIAGLLKTQQYHTQFIYGGESHFDNMKSFFLGNGFVDMQDLPTFSNPKFVGSWGASDEDLFNKADEQFTQMAKEGKPFFSLVFTSSNHSPFEYPDGVITQYNEPKQTVENAVKYADYALGQFVEKAKKSPYWDNTVFVVVADHDARTQGTNPIPVEYFHIPAVIFGGGIEARKDDRLLSQLDLAPTLLSLAGISSQNPMIGFDLTQDVPVEKQRAMMQRDKNFGWLTPDNQVVVLQPGQDITTYQYDSVTHKMTPLQLDESIVTRAHANAMWGSLAFKENFYTAQKSYELEK

SEQ ID NO: 77655 - protein, 663 aa, Vibrio cholerae
MVGNGKARGTLVISSFSGIPMQDTAIQFSDLALNSAILSALTEMGFVSPTPIQAAAIPVLLEGRDALGKAQTGTGKTAAFSLPLLNKLNLSQYKPQAIVMAPTRELAIQVAAEIKNLGQNIKGLKVLEIYGGASILDQMRALKSGAHIVVGTPGRVKDLITRDRLHLDECHTFILDEADEMLKMGFVDDVTWIMEQAPESAQRVLFSATMPPMVKEIVERFLRNPECVDVAGSNQTVAKVEQQYWVVKGVEKDEAMARLLETEETDASIVFVRTRQDTERLADWLCARGFKAAALHGDIPQSLRERTVDHIKQGVIDILVATDVVARGLDVPRITHVYNYDIPFDVESYIHRIGRTGRAGRKGKAILLVRTNQIRMLRTIERVTRSSMEEIQLPHRDKVAESRLTKLGQELAADKEFSSLERFADLVEKLQASLEIDATTLAAILLKRQQGKRPLFYVGADPMIEAMEREKSRRRERRDDRRDGDRPARREFGGRDQENHDWDTYQLQVGRDQGVQVKDIVGALANELGLTKGSIGAIKLAQGHTFVQLPKAMSNDVSSKLRKLRIRQKEVGAVVCDFDDFRESRGGARREGGPRREGGRRPEGNREGGFRGGREGGREGGRGRGGEGRPFREGERRFERNRSGESSGSYRGERGHSRRREEA

SEQ ID NO: 77656 - protein, 678 aa, Vibrio cholerae
MFQDNPLLAQLKQKIQETLPKKEGTIKASDKGFGFLEVDSKTSYFVPPPYMKKCMHGDKVVAFIRTENEREVAEPSELIEQSLTRFIGRVKLFKGKLNVAPDHPQLKKLSLKAKTKKGLNEADFQEGDWVVAHLVRHPLKGDDGFFVQISHKITDANDKIAPWWVTLAENDLPNSEPAGIDDWQLKDDADLVREDLTALPFVTIDGESTKDMDDALYAQQLPNGDFALTIAIADPTAYITPEDEMDKVARERGFTIYLPGRNIPMLPRDLADELCSLMENQVRPALCCSVTIRKDGVIGDDIRFFAANIKSHARLVYDHVSDWLETGSSEQWQPSEEIAQVVRDLYAFSQARANWRETHAVVFPDRPDYRFELSADNDVVAIHADMRRTANRLVEESMITANICAGKTLQTTFGFGVFNTHAGFKAEKMADVVELMAVNGAPNADAETLATVEGFAALRRWLATQETSYLDNRIRKYQSYSEIGNQPLPHFAMGLDVYATWTSPIRKYGDMINHRLLKAHILGKAPVQTPDETVGEELALHRKHHKIAERNVADWLYARTLADEPAKETRFQAEIFDINRPGMRVRLLENGAMAFIPGALILDNKERIECNGEDGTVLIDKEVVYKLGDVLEIVLTEVNQENRSLVGKPTQVFADLVSETQTSAEQPAEGAENNEPQV

SEQ ID NO: 77657 - protein, 501 aa, Vibrio cholerae
MNKLFVMALMSAALSANAEDKVWISMGADAVGSLNPALSESLLPHSFASGSQVWIGEVAIDELAELSHTMHEQHNRCGGYMVHTSAQGAMAALMMPESIANFTIPAPSQQDLVNAWLPQVSADQITNTIRALSSFNNRFYTTASGAQASDWLANEWRSLISSLPGSRIEQIKHSGYNQKSVVLTIQGSEKPDEWVIVGGHLDSTLGSHTNEQSIAPGADDDASGIASLSEIIRVLRDNNFRPKRSVALMAYAAEEVGLRGSQDLANQYKAQGKKVVSVLQLDMTNYRGSAEDIVFITDYTDSNLTQFLTTLIDEYLPELTYGYDRCGYACSDHASWHKAGFSAAMPFESKFKDYNPKIHTSQDTLANSDPTGNHAVKFTKLGLAYVIEMANAGSSQVPDDSVLQDGTAKINLSGARGTQKRFTFELSQSKPLTIQTYGGSGDVDLYVKYGSAPSKSNWDCRPYQNGNRETCSFNNAQPGIYHVMLDGYTNYNDVALKASTQ

SEQ ID NO: 77658 - protein, 309 aa, Vibrio cholerae
MNDLFTKTDYSLYSNAMTFVRRPYVRNPVDTNADVVVLGVPLDMATSGRPGARMGPDAIRRASVNLAWEGKKFPWDFNLFKKINVIDAGDLVFDCGDAEDFTYRLEAATSEILKSGKTMLALGGDHFITLPILRAYAKHFGEMALIHFDAHTDTYANGSAYDHGTMFYHAPKEGLISAKHSVQVGIRTEYKQEGHGFNVINAMQANDMSVEEIVAQIRHIVGDKPVYLTFDIDCLDPAFAPGTGTPVCGGLSSDKILKIIRALKGINLIGMDVVEVSPPYDQSDLTSLAGATIALELLYVWASNKKDEE

SEQ ID NO: 77659 - protein, 530 aa, Vibrio cholerae
MAAKHVLFSTDARQKMLSGVNLLANAVKVTLGPKGRHVVLNKSYGAPTITKDGVSVAKEIELADKFENMGAQMLKQVASKANDEAGDGTTTATVLAQALINEGMKAVAAGMNPMDLKRGIDKAVSAAVEKLHQLAKPCSDTQSITQVGAISANSDHAIGEIIAQAMEKVGRNGVITVEEGQALQNELSVVEGMQFDRGYLSPYFINQPKAGCVELENPYVLLVDKKISHIRELLPILESVAKASRSLLIIAEDVDGDALATLVVNSMRGIIKVAAVKAPGFGEQRKAMLEDIAALTAGRVISEEIGLELEKVTLDDLGSAKKVTINKDNTTIVDGAAEPSALQDRIAQIQHQLEHTTSQYDRDKLQQRIAKLSGGVAVIKIGAATEVEMKEKKDRVDDALHATRAAVEEGIVAGGGVALLKIANELSNLQGDNDDQNVGIRIALRAMEEPLRQIAINAGDEASVIANQVKTGDEHYGYNAATGQFGNMLEMGILDPAKVTRSALQFAASIAGLMITTEAMVSEVDKESAA

SEQ ID NO: 77660 - protein, 328 aa, Vibrio cholerae
MIGREGVTTLRFTVKQQFITHKHTLYGVAAILLWGSLMALTRRVAEEFSPIGGAALIYTVSTLFLLFAMGMPRLKAGSSRYILIGGALFVSYEICLALALGMASDRLQAIEMSVINYLWPALTVLIAVLLSQRAVSFWVYPSVGLAFAGVAWTIVAEQGISLADFSARIATNPAVYAMALTGAFIWAIYCNVTQRLARGQNAIVLFFAATAATLWLQYALSNEPALSFTGSSMGTLLLTGIVMGSGYALWNVAILRGNMLLLATLSYFTPVISTLFSSLILGVVLGLSFWQGVIMVTFGSLICWWVTRESSSSTGEVPETPPPLKEQS

SEQ ID NO: 77661 - protein, 192 aa, Vibrio cholerae
MKMSELEKMLKGEHFDGASAEIEALRSQAGRLKLEINQSLDEAERYALQRELFGHLGHKSCVQPPFHCEFGKTIRIGDHTFINMNVVMLDGAPITIGDHVLIGPSTQFYTASHSLDYRRRQAWETICKPIVIEDDVWIGGNVVINQGVTIGARSVVAANSVVNQDVPPDTLVGGTPARILRSLKDPAESMAE

SEQ ID NO: 77662 - protein, 437 aa, Vibrio cholerae
MSFFENISIIMALIAASCFFSMSEISLAAARKIRLRQMADEGDERAERVLELQARPGNFFTVVQIGLNAVAIMGGIVGESAFTPYIRALLEGLIPANLLSQASFVLSFMLVTSMFILIADLMPKRIAMAMPERIATSLVGGMLICITLLKPFVWFFNGLANLLFRALSVPTERNDEITSDDIYAVMDAGAEAGVLDKGEQQMMESVFEMQSIPVTSAMTARESLVFLNLSDSEEVIKQKISQHPHNKFLVCDGQLDQIKGYVDSKALLIRVINGQGMNLKESNVVIGCPIIPDTLSLSEALEYFKINRVDFAVVMNEYALVVGVVTFNDLQSAVMGTWVLAEGEEQIVARDGNSWLVDGVTPITDVMRSFAIEEFPQQQNYETIAGFMMYMLRKIPRRTDSVVYAGYKFEVVDIDNYKVDQLLVSRVEPLEPIVKEE

SEQ ID NO: 77663 - protein, 3263 aa, Vibrio cholerae
MQSQVVTQPVTVTSLSGNVVVVNAQGQARIVNAGDVLQPDEIIITVNQSAIELQTTQGGVQIDENCVACLPEFSADGQPEVQAAPVQGQINLDLAQLDTANFDEQAIAAIQQAILDGVDPTTALEAAAAGAGAGGSANGGAITIDYNFLEVLASTAFDTQGYNQTFSTTQTLVNPLRFAAGGESLSTQVTEGSLSLGTYPQTSTVTSLITAGSLALLPASFVPEAAFLTSLLAELNQDITSSGQPVVFRYDAATNSIIGEQNGSTVLSIAISAESIGRDVNLTITTTLSQPIDHLPSVGGGLVSISGDQISIALQLTGTDSNGNVIQAPIDVVVAINDGSAPVMVDEPTLSLNENDLPAGSDGADPLTVSGQFDTQLGSDQVASYQIDPSTANPIAGLTSQGDAVILGEPTLIDGNRVYQATAGGRDIFQLTLNADGSYQFVLQGTLDHAAGSDALTISLPIVAIDYDNDSSAPGNLNIEIQDDKPIIIGAEQLTVAEQTLDTGSIGGGASLVADGNFTTTQGSDGVVSYRLDSLTDSVAGITSGGVAVTLSESVDANGNYTYTATAGGEPVFTLLLNQDGSYRFTLQGSLDHALNSDELLVNFTVVATDFDGDTASITLPVTVKDDKPYFTNVTSLNVHENDLPQGSDVTKEPLTASGQFELVQGSDRVASFTLDSSVNPVQGLTSNGVAVTLSAPVDDGHGNLTYTAMAGAVTVFTLTLNTDGTYSFTLAAPVDHALNSNDLTLNFQVIATDFDGDSDSIVLPVKINDDKPYFTNVQGLYVHENDLPQGSDTDKEPVTVNGQFQLVQGADTVASFALDSSVNPVQGLTSNGVAVTLSAPVDDGNGNLTYTAMAGSVTVFTLTLNSDGTYSFTLAAPVEHALNSDSLTLNFKVIATDFDGDTASIVLPVTVLDDQPSVISAQALSVNEDDLATGTDQSKESTTANGQFTTTQGADGIAHYQIDTSTSSNTGLTSQGQPVVWGAPSITTTSSGQVYTYQGIANGVVIFTLVLRADGSYSFTLNGAVDHPLNANELTLNIPVLAQDADGDTSPITLPVTIVDDVPILHDKNIALQEGSVASSVNLFSRDNNLSPDTQGADRGVITHFSAVDEAGRDIQFREGSVLSNDIELNGAAKTVTVVEIVNGVSRDLGTLTIQPNGTATFTPVTQLDHTDGNDIKFTVDVTATDYDHDTSTEQLNITIYDHKATITQQKFTGYEDQGHDAALNLVPAGEQSNAQDNLGGLPVEALKLALQVNLYDVDQGESLGEVSIWNPNQIRGDFYYLDSANQLVKLDVDPASGHVVLPAALLQQSINGTIATVENLYFVPDRHYSTGNGGMNASVSVEILHNGVRDHFTNGNMRIEIESVADIATWKSSSEFHYDAVEDGSNVSLNIAAETQDNSNPEAITYQIRFTENGANANLVYSDGSPIPTKTDANGTYYEVPANKIAQVQVDPADNFAGQIKLDVTAITKESTNYVAGKQTAQSETKEIVIDVAPEADRGSFTVNRISIFEDNASNQNAVDPSVEHDPLLLSEVISMTGSSDADGSEALFVRLSDFTDTGATLVWLGSGPSPITVGTYPNGETYYEIPQSALSQVEVLPTKHSNENFSFVVEGIVKDTVNLSTGQVQDIESLGSKTVNVTVKGVADLPNIDFISGNTQWQSFNDGTHQGVITTVAEDSLVDLNFSIISGEIADSPTDSSETISVLLSNIPDGVKLFDSDGTSVDLVFAGYDSNHKPIYQANLTVAQVVTGIQVQPVASSTANIDIKATVIVTENDGHVRQVEETIRILVEPKIDVTENYHNAVSGNEDDRIHVTWVPQNTPGNIQNPDAQEYFSRVEISGFPDGSRVFVNNVEVTLINGVLVLEPAAGQSDLDFSNQVSAAGYIQVIPPHNSSTDFTLSTAITVKEQDHEYVDAGNPGQGIAEEVIHGSIGVKVNPIAEPDGQLLVENAGSVTQTVQADANGKIDFTINNVSGGQAGANVIRFDNLDSNTAGSYQSDELVDQLVVSFGNVPQEVLNQLLITGAINNGDGTWTITNEADFSIKAPNGLVYSSNNDPDKNGFNDIKITITAKVYDQGEDSSEVKITKQVSTELTLSFPTEVTGNNSVAAQLNWVGDADDLVIGKEDNTVNLGQQIQDKLMVNATGFDAVADELSIVINASDLPAGASIGGQDFNFVDGHYVFKGTLNPDGSISGLEGLVLIPPRDFAGDFKLPITFVTTDTQSGDEKTLTAQVPVAISPVADVPSSSGDQPLDNHVTPSITLNVQETLGLDANHQPTDLANDTPTQDGIAYEDGIVHLNLAIGLADSLNGSTQGQEVLTEVTLTLNDTNSGVFVDANGQSLGTSITLTQAELPAALGEIYFKPAPNYPSGNDINTVGMTVTGKVTDSTVFDETNASLQGVSSSDADKTFTSQVSFEVKPVVDDITIGSGSPISVTGDEDSWIALADQGNAFNVSLNDNDGSEQFVSLVLTGLPTDFLVKSLSSDYVVKNNGGGEWSVQIRNPNLTSLDLSALAIKPTKDFSGEVQLGIKVFTQESLLGEPVEHTGQFTLNVTPIGDDVDIAPITNVVGNEGQAIDISLGAQILDKAPSLPGGVTYTENSPETLRVEISGVPDGAFLSLADGTLGTSLGGGVWVFEINAQQLDKVVFNSGDNNQLNWNGNLHFKVQSVDTGLAGDQHLGSAQEFDVHVDVTAVNDRPELINVQDQVTEEDTPLLLNSFTLADIDAQLDDPNADYTLQIGVNSGVLIIDSSLSSGLTIQGDGTGALSITGNVAEINAAIGAGLVKFVPSPDFYGQVAVTLNVNDNGNAGSEIAGDASTAHDNSAQFVIDVTAVNDKPEVDGIHLTAQIDEASGQKLTGITVSDVDYAGSHTNDVMKVTLSISEGILSVQAPAGSSVAVSYALDGSVILEGSPEAINALLNHSDSAYGLFVDATAIAGTQINLTVTAQDMGVYFENASGMALEESKTYPIQVNPVANAPSLSMNPAFGYAQQIYANQSLSAQGIALLGAIAALTDLHETLSLRVDHLPAGASLSSTAGSVTDLGNGRWEVSPDALESLKVVGLDEGVHTLSLTALSTESDGSSAPSANSIDYRIEIAADGSLLDHRSATDDSLLVAGNSGMTLLSGSGDDFVQGGAGDDVLVGGLGADILVGGTGADMFKWTLDGVDDKVDHIRDFNVNEGDSIDLIDVVQDLGNHLTMEQLLNNLSVSNQLTAQVVDNDVTLQVTTDNQVQQTIVIENLATQIDFTGMSSLDIIGTLLDQNLLRHD

SEQ ID NO: 77664 - protein, 412 aa, Vibrio cholerae
MLYKSSLAVAISALIAGQVSAAGFQVAEHSASGLGRAFSGEAAVADNASVLARNPAAMMLFETAQFSGALSIVDPEVNVDDLSNNQSMKDVAPLQIVPAAYYIRPINDQWAWGLAMFTTYGVATDYPNEIYAGDLAGDTSLISVNLNPNIAYRVNPELSLGFGLDLVAAKAKLTRHKGGLAPFMGGGNPSDNLIGMTGETLALGWNIGALYELDEQNRIGFGYRSRVKLNFDDGEFSSYDSGIATSAVVPGQLKIELPAIWELSGFHQLNEQWAVHYSYQQTDWSSFEELTATSSQCKNGTCFQKIEQYQDNGRWSVGATYTLNTTWTLRAGLAFDEQAGKATLSIPDSDRFWYSAGLTYTLTPQLTMDAGFALVQSRKGSFTEKNQIGQNLQFESEAVAYISALQFNYRFH

SEQ ID NO: 77665 - protein, 217 aa, Vibrio cholerae
MKQTICGLAVLAALSSAPVFAHQEGDFIVRAGIASVVPNDSSDKVLNTQSELAVNSNTQLGLTLGYMFTDNISFEVLAATPFSHKISTSGGELGSLGDIGETKHLPPTFMVQYYFGEANSTFRPYVGAGLNYTTFFDESFNGTGTNAGLSDLKLDDSWGLAANVGFDYMLNDSWFLNASVWYANIETTATYKAGADAKSTDVEINPWVFMIAGGYKF

SEQ ID NO: 77666 - protein, 473 aa, Vibrio cholerae
MMKKSQVLANTIKSQIEQNIWLSGEKIPSIRSTCKRYKLSIETVLQAYQQLEDQGYIRAKAKSGYVVLPRRNTLFAGNLSAKVIKPYPVKISDLLYDVLQRAKDPEIIPFSSAFPDPALFPHQALSRSLANASRQMLGSCMLTNLPPGSQTLRRQIAQRYQKSGLNVLPDDIVITSGAMEALNLCLQSCTKPGDLVAIEYPAFYGVLQAIERLNLTAVEIPTDPRDGIDLDVLASVFSSMDIKACWFMTESQNPLGYSMSETNKQRLAELVNHYQIPMIEDDVYRELGIGNPSSLPAKAYDKVGNILLCGSFSKSLSPGFRIGWVVAGERALNIQRLQHLSTLSSSIPIQLGLSHYLTFYNFDHHLKKLRKLLNERKKAHAELLRTYLPHNTKIHLNNGGYFIWVELPQTIYAETLYEQALEHNIAIAPGILFSSDKRFSHHIRLNCSYACDERIEQAIQTLGQLIHTMEINR

SEQ ID NO: 77667 - protein, 530 aa, Vibrio cholerae
MGAFMIDVVELSRLQFALTAMFHFLFVPLTIGMSCLLAIMESIYVLTGKQIYQDMTRFWGKLFGINFALGVTTGLTMEFQFGTNWSYYSHYVGDIFGAPLAIEALVAFFLESTFVGLFFFGWSRLSKRQHLLITWLVALGSSFSALWILVANGWMQNPVGAEFNYQTMRMEMTSFAEVVLNPVAQVKFLHTVASAYTCGAMFILGVSSYYLLQGRDIEFARRSFAIAATFGMAAIISVIVLGDESGYKLGDVQKVKLAAIEAEWHTEPAPAAFTLFGLPNQKEGKTDYAIKIPYLMGLIATRSFDEQVTGLHDLRHEHLLRIRNGMVAYQLLERLQAGDASVETQRKFEQTKHDLGYGLLLKRYTDTITDANEAQIQQAADDSMPTVWPLFWSFRIMVGCGFIMLFVFGAALLQTCRQRITHKPWVLKAALWSIPLPWIAIEAGWFVAEYGRQPWAIGEVLPVTVAVSSQTFENLITSLAIILSLYTVFIFVESYLIVTVARKGPSSLKTGRYQDEQSLYEHKLAQQVQY

SEQ ID NO: 77668 - protein, 358 aa, Vibrio cholerae
MKMKHMKPYTTMKTVLSTLAIALAFGPLHNAQACTRILYETGNQSYISGRSMDWADPSAATALWVFPKGMKRDGTVGDNPIKWSAKYGSIIVSFYDAGTADGMNEKGLVANMLYLKEAKWGDATKAGKPTLTAGAWAQYFLDNYATVEEAVTAMANPPFTIIAPSLPNGDAAALHLSISDVNGDSAIFEYIDGKLVIHHGSQYKVMTNSPTFDQQLALNTYWQQIGGSKFLPGTINAADRFVRASYALSASPKYRDNDLALASVFSQIRAVSVPLGITDPDRPNLAMTLWRTFADHTAKIYYFESAVFPAVSWLDMSKVDLTEGAAPKVVRVERGQPLAGELSAALKPAEPFKWLGAE

SEQ ID NO: 77669 - protein, 343 aa, Vibrio cholerae
MKIKALSKLKPEQGIWMNEVDMPELGHNDLLIKIKKTAICGTDVHIYNWDEWSQKTIPVPMVVGHEYVGEVVGIGQEVRGFQIGDRVSGEGHITCGHCRNCRGGRTHLCRNTIGVGVNRTGCFSEYLVIPAFNAFKIPDGISDDLASIFDPFGNAVHTALSFDLVGEDVLITGAGPIGIMAAAVAKHVGARHVVITDVNEYRLDLARKMGVTRAVNVAEQNLEDVMKELGMTEGFDVGLEMSGVPSAFSAMLKTMNHGGRIALLGIPPSSMAIDWNQVIFKGLVIKGIYGREMFETWYKMASLIQSGLDISPIITHHFKVDDFQKGFDIMRSGASGKVILDWQ

SEQ ID NO: 77670 - protein, 397 aa, Vibrio cholerae
MSSAFYQQIRTQLEEVKAEGLYKSERVITSQQQAAVEISTGEQVLNFCANNYLGLANHPALIEAAKQGMDSHGFGMASVRFICGTQDIHKQLEQKLSQFLGKEDTILYTSCFDANAGLFETLLDKEDAIISDALNHASIIDGVRLCKAMRFRYSNNNMAELEEQLIAADAAGARHKLIVTDGVFSMDGVVANLPAICDLADKYNALVMVDDSHAVGFMGANGRGTHEYHDVIDRIDIITGTLGKAMGGASGGYTSGKKEVIDWLRQRSRPYLFSNSVAPSIVAASLRVLDLLQESGDLRERLWENAAHFRTRMEAAGFTMGGADHAIIPIMLGDAKVAAEFAERALAKGIYVIGFSFPVVPKGQARIRTQMSAAHSREQLDKAIDAFIEVGRDMGLI

SEQ ID NO: 77671 - protein, 501 aa, Vibrio cholerae
MMVIPENSSIVIFGASGDLTYRKLIPALYHLYASQQLPKSFAILGVSRTEYSDESYREKLKRSLQELEKTEPAALEAFMQHVHYQALNTSEVADYQHLATRLDTLANDYQFEQRNTLFYLATPPSLYGVIPACLAAHGLNDESQGWKRLIIEKPFGYDLQSAQDLDVEIHHHFKEHQIYRIDHYLGKETVQNLLVFRFANGMFEPLWNRNFIDYVEITGAEFLGVEERGGYYDGSGAVRDMFQNHLLQVLAMVGMEPPAAINADSIRNEVNKVLQSLQPLSESDLRNNLVLGQYTESEVRGQFLPSYRNEPGVAADSRTETYVALKMFINNWRWNGVPFYVRSGKRLPTRVTEVVIHFKRTPHPVFGQNAPENKLIIRIQPDEGILMSFGLKEPGAGFKAKEVSMNFHYASLEQIKMLTAYERLLLDALNGDATLFARTDAVEACWKFVQPILDFKQDPQSLYGYACGTWGPKESDDLLRRDGREWRFPCKNLTNTDYCEL

SEQ ID NO: 77672 - protein, 482 aa, Vibrio cholerae
MKGDIGVIGLAVMGQNLILNMNDHGFKVVAHNRTAAKVDEFLEGPAKGTNIVGAYTLQELVDKLATPRKVMLMVRAGQVVDDFIEQLVPLLDKGDIIIDGGNTNFPDTNRRVKALREKGIHFIGTGVSGGEEGARFGPSIMPGGAPEAWEAVKPIFQGISAKTDAGEPCCDWVGNDGAGHFVKMVHNGIEYGDMQLITEAYQFMKDGLGMSADEMQAVFADWNKTELDSYLVEITADILGYKDEDGEALVEKILDTAGQKGTGKWTGINALDMGIPLTLITESVFSRCLSALKDQRVEAEKLFGKTKTQVEGDKQVWVDALRQALLASKIISYAQGFMLMREASNENGWNLNYGNVALMWRGGCIIRSAFLGNIRDAFEKNPELAFLGSDAYFKGILDNCLAAWRKVAAKSLEVGIPMPCTTSALTFLDGYTTARLPANLLQAQRDYFGAHTYERIDRPRGEFFHTNWTGTGGNTASTTYDV

SEQ ID NO: 77673 - protein, 379 aa, Vibrio cholerae
MILDSQLAQQIVDRTMAIIGYNINVMNQAGVIIGSGEKNRIGQVHDGAILALKHGDSVELTAESCVALKGVKPGINMVLRNQQQVVGIVGITGEPKDIRDFANLVKMSAEMIIEQAALVEQLQWDRRHREEFISAWIHNTLSAAELDAWAARLSIDLSKPRVAVVIAFRQPKSGQSLDQIRQVVELLEHPERDNLVAVVSMQEIVVLKPCRTPEHWTSEYESLRIDKLMARLKAYDITGYDIALGQLFINPNAIHLSYQSAKQVLRIGQVRQPEKQKHLYEELRLPVLLLPLNEGWQGEQWRRVMQELQTQDKSGQLVKTLKGLFAANGNLNLCAQQLFIHRNTLRYRLEKITEITGIETNSLLGLAELYIAYQLTSYD

SEQ ID NO: 77674 - protein, 350 aa, Vibrio cholerae
MHSWWEHSMTTLTITRPDDWHVHLRDGDVLADTVRDISRYNGRALIMPNTVPPVTTTEMALAYRERIMAAQPQAHFEPLMALYLTDNTSPEEIRKAKASGKVVAAKLYPAGATTNSDSGVTSAKNIYPVLQAMQEVGMLLLVHGEVTTHEVDIFDREKTFLDTVLAPIVNDFPQLKIVLEHITTADAVTFVQQAGDNVAATITAHHLLFNRNHMLVGGIRPHFYCLPILKRATHQHALVAAATSGSKKFFLGTDSAPHAKGRKEAACGCAGSYTAHAALELYAEVFEKEGKLENLEAFASFNGPDFYGLPRNQETVTLTKQAWPVAESMPFGSDIVVPIRAGENIEWTVK

SEQ ID NO: 77675 - protein, 406 aa, Vibrio cholerae
MVSPTTQKEKDMNMKNALSTVALSTLVALGSFGAHAAIEEGQLTIWINGDKGYNGLAEVGKKFEADTGIKVTVAHPDALQDKFPQTAATGDGPDIVFWAHDRFGGYAEAGLLVEIKPSAKIQEGIVDFAWDAVKYNGKIIGYPIAVESLSLIYNKDLVPNPPKSWEEVAELDAKLKKEGKSAIMWNLKEPYFTWPLMAADGGYAFKYGVDGYDVKDAGINNKGVKDAMNFVKGLVDKGVISPDMDYSVSESAFNQGNTAMTINGPWSWGNIEKSGINYGVTTLPKFNGQASKPFVGVLTAGISTASPNKDLAVEFIENYLLTNDGLRMVNNDKPLGAVALNSFQRELDADARIAATMDNAMNGEIMPNIPQMNAFWSSAKNAIINIVDGRQTVDAALADAEKQMTK

SEQ ID NO: 77676 - protein, 373 aa, Vibrio cholerae
MASVTLKNVCKAYGDVLISKNVDLEIQEGEFVVFVGPSGCGKSTLLRCIAGLEDITSGDLYIGEQRMNDVEPSKRGVGMVFQSYALYPHLNLYDNMSFGLKLSKADKSEIKKRVDHAAEILQLSHLLDRQPKALSGGQRQRVAIGRTLVSQPNVFLLDEPLSNLDAALRVQMRSEITKLQRKLGCTMIYVTHDQVEAMTMADKIVVLDAGFVSQVGKPLELYHYPQNRFVAGFIGSPKMNFMSVFIEGVEKDRVQVQLSNGTTFWIPVDGTTVTRGERMSLGIRPEHLVEAEHGDAKIEGKVMIVEKLGNETQVYMNLKGSDSDVIYRQPDTLDVETGDTLTIGIPAHRCHLFHSDGRACRRLHKEKGVDLPA

SEQ ID NO: 77677 - protein, 434 aa, Vibrio cholerae
MSGLKGRENMGKSKEKGIESSESLFQWERVGRFNFPVWTVLIGTLFARTSFFMAWPFLVVFLYQDYHATATEVGAMLATSALVGSLTGLYSGYLSDKFGRKWVMVSGTLIATFAYTGIGLSNQIWQFFIMIVLTGLMRPMIEAPGKAVIGDNLPDEKDRELALNVRYFLLNLGGAIGPLIGITLALAHPQVLFIVTGIAYFLFGLWLLATLERKGRFQQPDRSLLPNFSATLRVISKDNVFVKMMLANFLMMFVYGQVESSLPQVIVRSGIADAAQLVAGLVLVNTMTIILFQFPTLKLLESVPLFTRTRLGMALMGLAQVGFMFTPEAFPLGWYLACFVLSMGEVIAFPTLNVQIDRLAPAHLRGSYFGAAALYSLGFAIAPLAGGMMIEYLNAQWLYGLCFVLCLAMMGLYYLAQREQEMGEKERLSRATEC

SEQ ID NO: 77678 - protein, 786 aa, Vibrio cholerae
MAIQHLSFEQLYQVAKLEKLECKSTKELAPIDEIVGQERAQKAVEFAMSIKEKGYNIYAIGRNGLGKRTMILRYLSRHQHDVNKLYDWCYVANFEDVRVPKVLKLPCGIGIQFRQDIEKLMTKLVTAIPLAFDNEIYFSRAEKLKNQLAQKQESELESITRTAKERGVSLTLTPQGEYQFVALNGEEMHTEETFDALSKREQEQFSNTIDELEVSLRNMVRQLTEWEESYSEKIKKLNDEVTLDVIAHFIKKLKLDYSKYPEIKAYLTELQKDIVENVEIFLDEGADQGELANASLDKKMPRRYKVNVLVSRNAEEFPIVVEESPNYHSLFGYIETATYKGTVFTDFSLIRPGSLHKANGGVLLMDAVKVLEQPYVWDGLKRALRSRQLSFTSLEKEVTLTGTVSLDPEPIPLDVKIILFGDYRTYELLAHYDPEFSELFRVTADFADEMPRDADSELHYARFISSIVHDANMLHCDRKAIARIIEHSSRTTGDQTKLSLHSAHIANLLRESNYVAKQANANLIRQIHVEEALRNQELRVNRLQQSMMETFVNGTTLIQTEGVAIGQVNALSVLATSDHAFGMPNRITATTSYGEGEIIDIERNVDLGGSIHSKGVMILSAYLSSVFGRTARIPLTTTITFEQSYGGVDGDSASMAEFCAIVSAFSKQPNRQDIAITGSMNQFGESQPIGGLNEKIEGFFDVCTIKGRKDTQGVIIPRSNMHNLMLRADVVKAVEKGEFHIWAIDHVTEAIEIFTGKPAGVATDDGSYPVDTVFGLAQAKLNALRK

SEQ ID NO: 77679 - protein, 378 aa, Vibrio cholerae
MIISASTDYRAAAKAKLPPFLFHYIDGGSYGEHTLRRNTDDLADIALRQRVLSDMSELSLETELFGEKMALPIALSPVGLTGMYARRGEVQAAQAAEAKGIPFTLSTVSVCPIEEVAPSIHRPIWFQLYVLKDRGFMKNVLERAKAAGVKNLVFTVDMPVPGARYRDMHSGMSGPNAAMRRVLQAMAHPSWAWDVGLLGKPHDLGNISKYRGSPTKLEDYIGWLGANFDPSISWKDLEWIRDFWDGPMIIKGILDTEDAKDAVRFGADGIVVSNHGGRQLDGVLSTVQALPAIADAVKGDLKILVDSGIRTGLDVVRMLALGADCTMLGRSFIYALAAQGRAGVENLLDLYEKEMRVAMTLTGAKSIAELSRDSLVKR

SEQ ID NO: 77680 - protein, 277 aa, Vibrio cholerae
MQMESQRRDVFYVSDGTAITCETLGHVVLGQFAVQPNEKTFPFVESDEKLSELLKQIQRSYQLHGVKPLVFFSMVIPEMRTRLLQAPAHFYDVLESIVQRVSLDIEMEPAPKLQRSRSVGKDSDTYFDRIAAIEYTLAHDDGVSLKDLDRADIILLGVSRSGKTPTSLYMAMQFGLRVVNYPFIAEDMHAMRLLPEFEFHRHKLFGLTINAERLTEIRENRLAGSEYASNQQCQQELATVEALFRREAISYINTSSLSVEEISTRILERTGLKRRLF

SEQ ID NO: 77681 - protein, 191 aa, Vibrio cholerae
MRVAEFDREQVLRSAMDEFMSKGFNKTSMQDLKRVTGLHPGSIYCAFENKRGLLIAALEQYTKQRVSEFNAIFAAHPTILAGLEQYMAMVVDECERDEIKDCLLQKALNELSCQDEEVETLIRATVGTWKQGMLAQLQEAQQRGEINPDSDCVLLTEYLVMGIYGLRSFAHTRPEKGLLKKLADKLLDAIR

SEQ ID NO: 77682 - protein, 204 aa, Vibrio cholerae
MSHIQFANRNLSVGKVLCVGRNYVEHIQELHNSIPEQMVLFHKPSSAVTSQLRAFHQEPLHYEAEICFLVEKGQYVAVGIGLDLTKRQMQSYLKSKGLPWERAKAFDGAAVLSRFVALDGLDADDLNLELLINSVRVQKGHVSQMLYSPQAVLQELKSYLTLEDGDVVMTGTPQGVGEVHQGDRFVGRLKCGEQTLIEVEWLAE

SEQ ID NO: 77683 - protein, 331 aa, Vibrio cholerae
MKKAAIAVAVLSAVVSGSTLAATVYDAEGTSLKVGGRLEFRGDFNGNDKGEEIEGTMLNKSRVRLNVAGETDIGAGMKGFGFWEAEQGVKSSAGTSTEQETTFKQRYMYVGMKGDFGSLSFGRQNTAGVQISDMSDIGTFTGDQKAFVSAGNEQINNTIAYGYDFESFKLKASYIADDQKNADGYGLSGIYSAPFGLDIGLGYAANDLGTDKGSADQIIAGLGYTMGDLYFGATYTTGDKDDKADTEFTGIEVSAQYKITKEFRLIAAYQNQEEETKNVTKDKADFFELTGRYDFTKNFRSYLAYKANGLDDKDAGYKVEDTIRLGLRYDF

SEQ ID NO: 77684 - protein, 155 aa, Vibrio cholerae
MSNVNMKKPMVTDIFVEGAKKGWVIATTSTVPNVLMAFVIIKALQITGALDLMGTVFSPVMAVFGLPGEAAAVLIGAWMSMGGAVGVVITLFDQGILNGTHIAILAPAIYLMGSQVQYIGRILGPIGTEGRYIPVMIGISVLNAFGAMWVMNLFL

SEQ ID NO: 77685 - protein, 157 aa, Vibrio cholerae
MSHFTDYSSPLGPMTLQASSQGLLGVWFATQTTQPEHLGDYVKECPILNKTIRQLDEYFSGQRTQFELPLAASGTAFQQSVWHALCKIPYGEIWSYQQLAEAIGNPKAVRAVGLANGKNPISIIVPCHRVVGKNGQLTGYAGGLERKAFLLELEKRR

SEQ ID NO: 77686 - protein, 266 aa, Vibrio cholerae
MRLIPLKAAAQVGKWAAAHIVKRINEFQPTAERPFVLGLPTGGTPLATYKALIEMHKAGEVSFKHVVTFNMDEYVGLAADHPESYRSFMYNNFFNHIDIQEENINLLNGNTDDHEAECKRYEDKIKSYGKINLFMGGVGNDGHIAFNEPASSLSSRTRIKTLTEDTRIANSRFFDGDINQVPKYALTIGVGTLLDAQEIMILVTGHNKALALQAAVEGSVNHLWTVSALQLHPKAVIVCDEPSTQELKVKTVKYFTELEAKNIVGF

SEQ ID NO: 77687 - protein, 416 aa, Vibrio cholerae
MELTMKKVSVIAAAVAATLAAGSAFAVDFNGYFRAGTGISGNGNADQAVNKAGTGRLGNENDNYYEFGFAEELKTGEQTWKVESMIAQGNSGANGWEDGDFNVAQFNVQAKGLLASDQEAVMWAGKRYYQRKDIHITDFYFLNTSGTGGGIENLSVGNQKLSVALVQDGDNTNSSGYIFDARLANIGLWENASLELAMAYNFATEKDSKNEVADDGVLVSAILHQGLSNGFNQTVFQYGTAGYGAQAANFWGAGSYYARGTEAFNDASGFRLLNWGVINLGENWEMGHQLAYLAGSDIGGQFGGDGANKNTYTGKSFDIDQYSVVVRPMYKWNDTMRTVFEAGYNAGEKISNGGLATEDFGNAKFTVAQAWAMGDSFWARPELRVYGTYLLDTENDKAFGDDDTEFVVGIQVEAWW

SEQ ID NO: 77688 - protein, 266 aa, Vibrio cholerae
MMIKRFFRPLLFAALQMMLVFAGLVWLLDSGAEAMGYTWQWHRVPEYVLIFEDGEWWAGDLLHGLLVTLQLTGISLIFTLALGLTTALLRQSRSLVGRALGTGYIAVVRNTPLLVQIYLLYFVFGPVIGLDRFATAVLALALFQGAYTAEVFRGGLNSIPQGQYEAARSLGLSRFFTFYDVILPQLLQRTLPPLTNEMVSLIKNSSIVSVMAIFDLTTQGRNIVSETAMPFEIWFSVAAIYLLLTLTLSALSAWLEHKLGAQWRSP

SEQ ID NO: 77689 - protein, 278 aa, Vibrio cholerae
MQLFGQRLGRFSVKTLLTGLLGLAFTLPAVASDTPNLDAIKERGTLRVGMSTFVPWAMRDKQGELIGFEIDVAKRLAADSGWQVEFVPTAWDGIIPALLAKKFDVIIGGMSVTPERSKSVLFTAPYSHSGVQLAANKKLAEGFTQLEDFNKRNVKIAARRGAFTVQVARETFPKASVLQFDDDAQAFQEVINGNAHAVIASSPKPEHESIKHSDSLFLPFSERLSKGNEAFAVRLGEEDKKAFFDQWIADRTADGWLQARYEYWFSTLDWQDQIASGQ

SEQ ID NO: 77690 - protein, 567 aa, Vibrio cholerae
MNSQVTHWLARDPDPKTRQELQQLIDTQQDAQIAERFQSRLEFGTAGLRGKVGCGPNRMNRLVIQETAAGLGHYLIAQLPDAKSRGVVIGYDGRPDSKQFAHDTASVLTSLGIKTYLTYQVAATPIVAFGVRHFNAAAAVVVTASHNPPEYNGFKVYWENGAQIIPPHDAGIAACIDQAAQQAIPYLALEQAEQQGLLHWLRDEYYQTYRKTIGASPLLQHHTKPQALSLAYTAMHGVGANMAETLLADVGFTHVSSVKEQREPDGTFPTVNFPNPEEAGAMDMVMALAKKVGAQLACANDPDADRFAVAARKADGEYQMLTGDQVGSLFGHYLLSQTDAHRQLVGNTIVSSSLLSKIAAAHGARYYQTLTGFKWLTNVAMQEQTEQHQFLFAYEEALGYTIGSTVWDKDGLSALVAFAQLAAELNAQGKTVWDQLEALYRQHGLHVNAQRSIALDPNSPPVGDKLRATPPKDIAGRKVLIVEDFKLARRTFADDKTETITLPTSDVLIYHLDGGARVIVRPSGTEPKLKCYYEVVTPFAAGEDFVSAQERADEQMSLLIAEHQTSL

SEQ ID NO: 77691 - protein, 314 aa, Vibrio cholerae
MKERMIVSVSSIRGTQHFYLGKVFRFALKSMGYIILVGGGTTIGVIFYLKNQVDFAKLKQKELESQSVFLLEEVSSLSELKENLESDLAVHEERSQIVSERLGDLEKVLGVNETDSELESRLDYAALTSSLRILMLAQIPSGSPVLGARTSSGYGKRIHPVTGQLKIHRGQDFAVNIGTPIYATADGVVEVTRISKTGSRVILFACYMAYGFSSSYSHLHKFVVKNGDFVKKGDLLAYSGNSGLSSGPHLHYEIRFIGRPLDPRPFVDWEINNFETIFTKVRGIRWEYLVNNAEQRVSSQLQLSSQKEAIFPES

SEQ ID NO: 77692 - protein, 384 aa, Vibrio cholerae
MKKNAVHFGAGNIGRGFIGKLLADADIAVTFADVNEPLVDQLSHQQEYKVKVVGSECKMETVSHVTAVNSASEALIERIIKTDLVTTAVGPTVLDIIAKTIAKGLSARFAAGNTQPLNIIACENMVRGTTHLKQQVYQFLTTEEQQQADALVGFVDSAVDRIVPPLQAANDDPLEVTVESFSEWIVDEQQFKGEIPQIEGMEKTDNLMAFVERKLFTLNTGHCVTAYLGCLKGHRTIREAIEDPCIHAQVKQAMQESGEVLIRRYGFDRALHSAYIEKILSRFANPYLVDEVDRVGRQPLRKLSANDRLIKPLLGTIEYGLPNGMLLKGIAAALKYRNSSDPQAVELQQSIEKEGVRSTLARYTGLAAESVEAQQIEALYQQMD

SEQ ID NO: 77693 - protein, 193 aa, Vibrio cholerae
MSRAVTRSRLNSTTDQFMAEKINESDILERLNQTHTVRGFFITTVDVLTEAIDALMQRIFRKDNFAVKSVVEPLLHDTGPLGDLTVRLKLLFGLGVIPDEVFHDIEHLIKLRNQLNHDATEYQFTDPQILAPIKALNLVKKMGMLHLNVVEPDDDIDLSFYHLQLQRQQQVIKSGLSLAIIQICNALNKDSPF

SEQ ID NO: 77694 - protein, 311 aa, Vibrio cholerae
MKIAMIGLGDIAQKAYLPVLAQWPDIELVLCTRNPKVLGTLATRYRVSATCTDYRDVLQYGVDAVMIHAATDVHSTLAAFFLHLGIPTFVDKPLAASAQECENLYELAEKHHQPLYVGFNRRHIPLYNQHLSELAQQECGALRSLRWEKHRHALPGDIRTFVFDDFIHPLDSVNLSRQCNLDDLHLTYHMSEGLLARLDVQWQTGDTLLHASMNRQFGITTEHVTASYDNVAYLFDSFTQGKMWRDNQESRVALKDWTPMLASKGFDAMVQDWLQVAAAGKLPTHIIERNLASHQLAEAICQQITQQVTKG

SEQ ID NO: 77695 - protein, 704 aa, Vibrio cholerae
MQDTLLNSLVYVSRYYGLANSPEALINGLPLADGKLTPFLFPRSAERAGLIAKENRAPLDQIPHLVFPVVLLLKGGEACVLNSINQETQEAEIVTAESGLVPVAYSLSDLEAMYIGRYFMVKKQFRFDERSPEVLKPRDGHWFWSTIYKSKHIYRDVLIASLLINLFAVAAPMFSRIVYDKVVPNLAFETLWVLSSGILVIFLFDFVFKMLRSYFIDVAGKKSDILISSKLFSKVMGIRMEARPPSVGAFARHLQEFESIREFFTSATISSLIDLPFALLFLVLIWLMAGHLVWVPVIGVLILVIYSFLIQSRLKRAIEEGSRLASQKYANLIESLAGLETVKLFGAQGQFQYRWEEAVAHMANWNIKSRRITDSIQNTAGFVQQAANIGMIIVGVYLISNGDLTMGGLIAATMLSGRAIGPLVQLSLLSTRYNQAKSSMTIIEQVMSMPDEQEEGKRYIHRPIIQGKIELDRVTFHYPNSPIASVRDLSLTIHPGEKVAIIGRIGSGKTTLERLIMGLYKPTEGHVRIDDTDISQLHHIDIRRNIGCVPQDSVLFYGSIRDNITLGRPLSDDREVMDAANRAGVTVFTQQDPAGLERQVGEGGMLLSGGQRQSVSIARAFLGRPPVLLMDEPTSAMDNRSEMHIKQQLSQLKPSETLILITHKTSMLDVVDRVIVMEKGCIIADGPKHEVLNDLRQGNVRAVQ

SEQ ID NO: 77696 - protein, 153 aa, Vibrio cholerae
MMQREFLSFVLDDEEYGIPILEVREVRGWSPVRILPNAPPFVIGLLDIRGEYIPIVDLKRRLGLVPVEINATTVVVVINAANQQPLGLIVDAVAEVYALSEQEIKHAPSISTVIGNQYVKGIAAVKSKHLVLIDIDALFDVEALRLSTTAESI

SEQ ID NO: 77697 - protein, 521 aa, Vibrio cholerae
MLCYNILIKDILMKKRLFGLILALGGAGIWLTKTEPAPSSLEISGPFEFNSQDLAKDGFLFSRLQVVESLVGINENSQPYPLLAKSWTVSDDGLVWRFQIRPEVQFHDGSQLTAQAAATALNHALGKPGVIKQVPIKAITAQNDQVVIELNTVYRPLAAVLAHYSLAIASPSSYDASGNVIRLLGTGPYQIAQLQAPHKASVIRFNAYWGKPASIETINYLAGHRSESRALLAQTGQADLVYTLDPISIPSLQQSHNLDLYIESMPRTVLIKLNNEHPLLNHADVRQAISLAINREGIAQSVLKLPGSEAHQLFSPALGAWHLADKTQPQRHLATAQTLLANQGWTLNDQGLLEREGQAFRVQLLTYADRPELPLIATALQAQLKEIGIQVDIAIDNSSAIPAKHHDGTLEMALIARNFGTIADPLPLLLSDFATHQGSDWGPTNWSSPQFSQLLAELSTESDNARYQQLAAQASQLLADEMPLIPVTYYRQIVSVNKRVAGFSFDPFEINYRVAQMSFND

SEQ ID NO: 77698 - protein, 708 aa, Vibrio cholerae
MFPPSYDAFQGVTAIGWACANMAHHFGISLVMTQPITYLLQLQQLAKQGQTRFGCWLRGDAQWQHHLLKTLVPHFAEQPILMLGQTELEGVTCVDYRQGQQWLGRECQLLIVDLTQGWDANSFNAVLGTLVGGGLLLVVGEPTTLNHCARVWLERACHRLLVITPQTVPALPNSDSVTRTNTEQTYTEQRLAIDSIIKVVTGHRKRPLVLTADRGRGKTSALGLAAAELMSSRSMHIVVTAPTLAAVEPLFVHAQRTLPQAHRQRGEVQTAQSSLRFMAPDELLRTQPESDLLLVDEAAALPLPFLKRWVERYHRAVFSSTIHGYEGCGRGFSLKFQSWLQVQRPQMRSLHLEQPIRWAAGDALEQWQNQVFLLQSELPEVALEQAREPLSFSLFSQPECVEQPERLAQVFALLVNAHYQTSPNDLFALLQDEAMTLFVAYQGEVCVGCVLAVREGELDAPTIEAIQLGTRRPKGHLTPVTLANQLGISQAARQSCWRILRIAVHPDCQRQGIGSQLLTHFIAQHHADYYATSFGVSEDLLPFWLANHFVPIKLGSHRDQASGCYSLLMVRGEHLDWLEQAKQQFSAHWIFELSDSLQALEPQIIQQLLPSTVALPQPLIPLELIERYARGGANYESVAVWLYAWLLATAPSLESLSPLLISKILQRKSWAACAEQFQLSGKRQVEQAVRTEILALLVNLQCKYTLPI

SEQ ID NO: 77699 - protein, 343 aa, Vibrio cholerae
MKTFIKGLVLSAVVASSQVYAEQTLNVYAWGGYLPEKSLKAFEQQEGVTINYSTFENNESMYTKLKLLKGTGYDVVFASAYFIEKMGREGLLAEIDHNQIPNMKDAMPTVLGLAHDPQNKFSLPYIWGITGLYYNSSTLPNGITKWADLWDKQYEQQVMLIDDIRDVFGMALKLNGFSINTKNEEEIKKAYESLVALKKNVLLYNSDAPHVPYVSGEATLGMQWNGNAYQGQVEMPELKFVMPEEGAVLWMDNFTIPSGSKNIPLAHKFINFMYQPENQAEIVQSLGYASATKGGRALLPAELRDNPTIFPSDEDMKKGEFINDVGPETLAIYEKYWQRLRNQ

SEQ ID NO: 77700 - protein, 274 aa, Yersinia pestis
MSASGEISTPRDYIGHHLNHLQLDLRTFELVNPHSTGPATFWTLNIDSLFFSVVLGLAFLLVFRKVAASATSGVPGKLQTAVELIIGFVDNSVRDMYHGKSKVIAPLALTVFVWVLLMNMMDLLPIDLLPYIGEHVFGLPALRVVPTADVSITLSMALGVFILIIFYSIKMKGVGGFTKELTMQPFNHPIFIPVNLILEGVSLLSKPLSLGLRLFGNMYAGELIFILIAGLLPWWSQWMLSVPWAIFHILIITLQAFIFMVLTIVYLSMASEEH

SEQ ID NO: 77701 - protein, 816 aa, Yersinia pestis
MKETNESRLLTTGVTRRKLVQTTLVGGLAMATGAFSLPFSRTARAVQSALNPTSANDGKVIWSACTVNCGSRCPLRMHVADGEIKYVETDNTGDDDFEGLHQVRACLRGRSMRRRVYNPDRLKYPMKRIGARGEGKFKRISWEEAFETIAGSMQNIIKEYGNEAIYLNYGTGTIGGTMTRSWPPGATLLARLMNCCGGYLNQYGDYSTAQIAAGLNYTYGGWADGNSPSDIENSKLVVLFGNNPAETRMSGGGVTYYLEQAREKSNAKMIVIDPRYTDTAAGREDEWIPLRPGTDAALASALAYVMITENLVDQPFLDQYCVGYDEKTLPEGAPENSHYKAYILGQGADKTAKTPQWAAAITGIPAAKIITLGREIGSVKPAYISQGWGPQRHSNGENTSRAIAMLAILTGNVGINGGNSGAREGSYSLPFVRMPTFENPVKTSISMFLWTDAIERGPEMTATRDGVQGKDKLDVPIKFIWNYASNCLVNQHSEINRTHDILQDDKKCEMIVVIDNHMTSSAEYADIILPDCTASEQMDFCLDASSGNMAYVIFADQVIKPRFECKNIYDITSGLARHMGVEQKFTEGRTQEEWMRHLYQQSQAAIPELPSFEDFRAQGMFKKRDPAGHHVAYHDFRTDPVANPLSTPSGKIEIYSAALAEIAATWELQKDDVIDPLPVYAAGFESHVDPLIEQYPLQLTGFHYKARTHSTYGNVDVLKASCLQEMWINPMDAERRGISNGDMVRIFNGRGEVQINAKVTPRMMPGVVALGEGAWYSPDAKRIDRAGSINVLTTQRPSPLAKGNPSHTNLVQVAKA

SEQ ID NO: 77702 - protein, 206 aa, Yersinia pestis
MLKKLDSLLTVAGITLPDQQKHQLIGYVELLDKWNKAYNLTSVRDPQQMLVRHILDSIVVNPHLQGSRFIDVGTGPGLPGIPLAIVRPDAHFTLLDSLGKRVRFLRQVQHELGLNNIEPVQSRVEAFTSEPPFDGVISRAFASLQDMLSWCHHLPAKPEGRFYALKGVRPDDELAVLPEDIVLESVIKLDVPELDGERHLIILKSN

SEQ ID NO: 77703 - protein, 629 aa, Yersinia pestis
MFYPDQFDVIIIGGGHAGTEAAMAAARMGRQTLLLTHNIDTLGQMSCNPAIGGIGKGHLVKEIDALGGLMAKATDLAGIQFRILNASKGPAVRATRAQADRVLYRLAVRTALENQPNLMIFQQPVEDLIVENDRVVGAVTQMGLKFRAKAVVLTVGTFLDGKIHIGLENYSGGRAGDPPSISLSQRLRELPLRVNRLKTGTPPRIDARTIDFSQLTPQLGDTPIPVFSFLGNAEQHPEQMACHITYTNEKTHEVIRNNLDRSPMYAGIIEGIGPRYCPSIEDKVMRFADRNSHQIFLEPEGLTSNEIYPNGISTSLPFDVQMQIVRSMKGLENARIIRPGYAIEYDFFDPRDLKPTLESKYIQGLFFAGQINGTTGYEEAAAQGLLAGLNAGRFANEEDGWSPRRDEAYLGVLVDDLSTLGTKEPYRMFTSRAEYRLMLREDNADLRLTETGRKLGLVDDIRWAHFSQKVEQIEKERQRLRDIWVHPHSENVSEINALLKAPLSKEANGEELLRRPEIDYRLLTSLTSFGPALTDPQSADQVEIQVKYEGYITRQQEEIEKQLRNENTLLPVDLDYQQVSGLSNEVIAKLNDHKPSSIGQASRISGITPAAISILLVWLKKQGLLRRSA

SEQ ID NO: 77704 - protein, 129 aa, Yersinia pestis
MRDIQLVLERWGAWVADNREDVYWPPIAAGFSGLIPSKVKSRTQCCDEDGLIISGIMAGLNSKHPVVHSLLFDYYVFGKTFMQLSKEHHCSDTHIGKKLQNAEGVIDGYLMALEVKLEMDKQVRRELAA

SEQ ID NO: 77705 - protein, 152 aa, Yersinia pestis
MPGKLTTALIAVIAALLVGVTYYQNEAAKLQRDVVEIASVANQQKKDLQLIEAQRQAVAAIDIKTTKELADVKSENERLRTDIASGTKRLQLNATCSKPAPKTTGPASVPDDASARLTNAAERDYLSLRERIGIATSQISGLQDYITNVCLK

SEQ ID NO: 77706 - protein, 398 aa, Yersinia pestis
MADNASQNKSLHRVAFKGEGGEYFSIWLVNLLLTIITLGVYSAWATVRRRRYFYGNTELNGDRFDYHAEPIEILKGRLMVIGGVILFYILLAIAPTLGLLVALVLLALIPWIIIRSWRYNAIMTSYRGVRFNYHCQTGQAYWALLFCPLLLILGLYAVIIVMAMFLGSVASTPSTAITLIVVSAILLVPLLAVINGIVSTLQHSLYVNNLYFGNSSFISTLKKSAFIKIAFFSVLIFIPFFFVAMMFAGAFFADLFQSALNGSIANENKTAMLIIQNASNLLFMMLMLLLGTMVSSSYRIVAQRNYLFSQTTLQGDIKLRSSMKLLSYMGLLMTNSLITVCSLGLATPIAEVRHARYMANATEIEGDLSLLNIHAHQDTANSALAEEAVQALDLGTGF

SEQ ID NO: 77707 - protein, 291 aa, Yersinia pestis
MTIKLISQLTALVSEPNSIHHVYFAKSLRAAPLLAQQVNFPRMELIIEGSQAMIWDRLYDDFHHKDEYIMHRGDILFIPSGGWNIPQWEQPVITLSILFGKQSLGFSLLSWDGESVVHKEMESVLRRGPRVGAYILQALNEMSLMQREQTTVQLIVRSLISHCIDLLRNQVKTPSRSQTLFESIREYIERNYSEPLTRESVAHVFHISPNYLSHLFRNAGNIGFNESVNSARLENAKILLKFYEMKIKEVANVCGFIDSNYFCRLFRKETELTPSEYRQQYRSNMMERDVI

SEQ ID NO: 77708 - protein, 395 aa, Yersinia pestis
MHIDHYSLPVYDKNNSDNTLKETELFKEVPYLSARLGEQAYEYSGGDISNYHLSIQYIMDVLADQAKGKVDLSHFSSEETLSSHVSLEKNEHNYHCFNQHASTVYHINNNDFGRTLVDLFEQMNNSGENVRALKIDSSQHSMAARLYIKDTEQGQRFVVNFYDPNITDKTVRCEVDDALKLNDYSLRNFISNQTYLSSYVDAEISSIIVCDQADIHDQHKVKENRALTPLSQSSPLPLSVARLDLLLTDNFAAGIQTMAEEVKNLSESERNTFFNQLLQPRAENDLSGLQCAFNYQCFDALEAYSALLVLAPPEQRTDLLTGKSENGWSSLAQAMSSGNSDMVSVCFYLLQWLPLDDMNAFVWKLLASLPLEDANTLMCPLEEPLPLDNMSTRVE

SEQ ID NO: 77709 - protein, 113 aa, Yersinia pestis
MTTLTPLQLFKNLSDETRLNIILLLKASGELCVCELCHRLNEAQPKISRHLAMLRESGLLLDRRAGKWVHYRLSPHIPAWAAAIIEQTYLSQRDEITLLAQGNVTPDSKMLCN

SEQ ID NO: 77710 - protein, 622 aa, Yersinia pestis
MSTEHKQYLSAVTLAAIGVVYGDIGTSPLYTLRECFSGHYGFDVRPDVVFGFLSLIFWMLILVVSVKYLTYVMRADNAGEGGILTLMSLAGRNTSSRATSILVVLGLIGGSFFYGEVVITPAISVMSAIEGLEIAAPALDPYIVPCSIAVLTLLFVIQKHGTGSVGKLFAPVMLVWFLTLALLGLRSIIANPEVLAALNPKWAISFFVEYKSVSFFALGAVVLAITGVEALYADMGHFGKFPIRLAWFTVVLPSLVLNYFGQGALLLKNPEAIKNPFFLLAPDWALIPLLILATLATVIASQAVISGVFSLTRQAVRLGYLPPMRIIHTSEMESGQIYIPVINWTLYLAVVLVIIGFERSSNLAAAYGIAVTGTMVITSILFCTVAWKNWHWNRFLVVFLLMVLLIIDIPMFSANVLKLFSGGWLPLSLGLVMFIIMTTWKSERFSLLRRMHEHSNSLEAMIASLEKSPPVRVPGTAVYMSRAMNVIPFALLHNLKHNKVLHERVVLLTMRTDDVPYVHNVERVTIEQLSPTFWRVVARYGWRETPNVAEIFHRCGLEGLSCQMMETSFFMSHESLILTKRPWHLFLRGKLFIALSRNALRAPDQFEIPPNRVIELGTQVEI

SEQ ID NO: 77711 - protein, 139 aa, Yersinia pestis
MKKGVLLNADISAVISRLGHTDQIVIGDAGLPIPATTTRIDLALTRGVPGFLQVVDVVTQEMQVENAYLAEEIVKNNPQLHEALLVLLTQLEQRQENQIALRYISHEAFKEQTKQSRAVIRSGECSPFANIILGSGVTF

SEQ ID NO: 77712 - protein, 319 aa, Yersinia pestis
MIPQDNELLTEIAVSYYQDEMTQEEIAHKFGISRIKVGRLLKRAKTEGIVEINVRYHPVFSTRLEQQLIEHFGLKRALIALDYQDEDEQRRQVAALVSAYLATNLKDNTVLAVGQGRNVAAIADHVSVVPERHCKFICGIGGTHRPGDAINADHISRRLAKKFGGTSETLYAPAYVENRALKEAFMQNGTIKETLDRARKADMALVGIGDMNENSYMVELGWFTPQEIVDASLHQGVTGEIAGYDFFDAQGQPANTVMNDRVIGISTQELRQIPCVIAIAAENTKALALLGALRTGAIDILATSASNARTILKMIQHQS

SEQ ID NO: 77713 - protein, 474 aa, Yersinia pestis
MIKSARSMAGLPWIAAMAFFMQALDATILNTALPSIAESLNRSPLTMQSAIISYTLTVAMLIPVSGWLADRFGTRRIFILAVSLFTFGSLLCALSGSLAFLVASRVIQGIGGAMMMPVARLALIRAYPRSELLPVLNFVTIPGLVGPVMGPLLGGLLVTYTTWHWIFILNIPIGLLGIFYARKYMPNFTMPKRTFDFVGFLLFGISLVMISTSLEIMGRPEIADYLPAATLLGGLLMLIFYIFHAKGHPNPLIGLPLFKTRTFSVGIAGNVASRLGTGCVPFLMPLMLQVGFGYSALIAGCMMAPTAIGSIMAKSAVTQVLRSLGYRKVLVGITLIIGVLIASFALQSPGMSAWMMILPLFILGIAMSTQFTAMNTITLADLTDNNASSGNSVLAVTQQLSISFGIAISATVLRFYDGLSLGGNVDHFHYTFITMGIVTLLSSLVFLLLKPRDGDNLIQGRNVKKVAPQVKNNV

SEQ ID NO: 77714 - protein, 351 aa, Yersinia pestis
MLKFIQNNREGTALLAILTLFALLGIIDRNYFSLQTFTMIFSSAQILILLAIGATLVMLTRNIDVSVGSITGLCAVTVGMALNAGFGLAASCLFALLVGMVAGFFNGILVTWLRIPAIVATLGTLGLYRGLMLLLTGGKWIEGLPADLKSLSTPILFSISPIGWLTMLLILAMAWLLGKTAFGRSFYATGDNLQGARQLGVRTDSLRIFAFSMNGVMAALAGIVFASQIGFIPNQTGNGLEMKAIAACVLGGISLLGGTGTIIGAILGAFLLTQIDSVLVLLRLPAWWNDFIAGLVLLGVLVFDGRLRCAVERNIRQQKYARFTAQAIISDKKPTVSDNNPAASNKKKAAL

SEQ ID NO: 77715 - protein, 530 aa, Yersinia pestis
MSQLDTTTPSGDYLMALDAGTGSVRAVIFDLNGNQIAAGQAEWLHLPVPDVPGSMEFDLTTNWQLTCQCIRQALHLAKLPASAIRAVAACSMREGIVLYDRSGTPIWACANVDARASREVSELKELHNNGFELEVYQCSGQTLALSAMPRLLWLAHYRPDIYRQAGTLTMISDWLANMLSGELAVDPSNAGTTGMLDLVTRNWQPNLLEMAGLRADILSPVKETGTLLGHVTAKAAQECGLLAGTPVVMGGGDVQLGCLGLGVVHAGQTAVLGGTFWQQVVNLPQPIIDPNMNTRINPHVIPGMVQAESISFFTGLTMRWFRDAFCAEEKLLAQRLGIDTYSLLEDMAARVPAGAYGVMPIFSDVMRFKSWYHAAPSFINLSLDPEKCNKATLFRALEENAAIVSACNLAQIAEFSGVKASSVVFAGGGAKGKLWSQILADVTGVPVKVPVVKEATALGCAIAAGVGVGLYEALDKTGERLVRWEREYIPNTEHKALYQAAKTNWQAVYTDQLGLVDCGLTTSLWKAPCL

SEQ ID NO: 77716 - protein, 371 aa, Yersinia pestis
MSHENLKGAQMAEGIPETMRAVVAYGPRDYRFERVPVPTIDAKEILVKVEGCGICAGDTKAFEGAPSFWGDDKQPAYIKAPMIPGHEFIGHVVGLGADVEGFELGDRVTSEQIVPCWGCRFCNHGQYWMCEKHDLYGFQSNVNGAMAEYLKFTKEAINYHVPDHLPLEKAILIEPYACAFHAVQRAKIKLGDVVVLAGSGTLGLGMIGAIKKSGAAKLIVLDLSDDRLALAKKFGADLVLNPSRDDVNTLIKEMTGGYGCDIYIDATGAQKAVEQGLTLLRKLGTFVEFSVFKDPVTVDWSIISDRKELDVLGSHLGPYCFPLVIEGISNGDLPTEGVVTHILPLEKYAEGIELVKRGVDSLKVVLNPNLT

SEQ ID NO: 77717 - protein, 151 aa, Yersinia pestis
MLSIAIGCDDAAIEMKNQIVIFLQSKNITVVDYSCDQHQEPTMYPDIAIQVALAIKAGKHERGILICGTGIGMSISANKVFGVRAAQCHDTFSAQRARKSNNAQIICLGARVIGPELAKTLIEAWLDAEFDGGGSTEKVERIRYYEQSLHD

SEQ ID NO: 77718 - protein, 851 aa, Yersinia pestis
MKNNDKLDSHTPMMQQYLRLKAQHPEILLFYRMGDFYELFYSDAKRASQLLDISLTKRGASAGEPIPMAGVPYHSIENYLAKLVQLGESAAICEQIGDPATSKGPVERKVVRIVTPGTISDEALLQERQDNLLAAIWQDAKGFGYATLDISSGRFRVAEPADLETMAAELQRTNPAELLYPENFEPMSLIEHRHGLRRRPLWEFELDTAKQQLNLQFGTRDLIGFGVEQAHLALRAAGCLLQYVKDTQRTSLPHIRGLTMERQQDGIIMDAATRRNLELTQNLSGGSENTLAAILDCSVTPMGSRMLKRWLHMPIRDIRVLTDRQQAIGGLQDIAAELQTPLRQVGDLERILARLALRTARPRDLARMRHAFQQLPEIHRLLQPIDVPHVQNLLSQVGQFDELQDLLERAIVETPPVLVRDGGVIASGYNAELDEWRALADGATDYLDRLEIREREKLGLDTLKVGFNGVHGYYIQVSRGQSHLVPIHYVRRQTLKNAERYIIPELKEYEDKVLTSKGKALAIEKGLYEEIFDLLLPHLPELQLSANALAELDVLANLAERAETLNYSCPTLSDKPGIKIMGGRHPVVEQVLKEPFISNPLTLSPQRRMLIITGPNMGGKSTYMRQTALIVLLAHLGSYVPADQATIGPIDRIFTRVGAADDLASGRSTFMVEMTETANILHNATEQSLVLMDEIGRGTSTYDGLSLAWACAENLASRIKAMTLFATHYFELTTLPEKMEGVVNVHLDALEHGETIAFMHSVQEGAASKSYGLAVAALAGVPRDVIKRARQKLKELESLSNNAAASTIDGSQMTLLNEEIPPAVEALEALDPDSLSPRQALEWIYRLKNMV

SEQ ID NO: 77719 - protein, 388 aa, Yersinia pestis
MRTAYLADRTFTPQGIETGVAVIVEQGEIVAVTRELPADAEIVHLTGKTLIPGLIDIHIHGRQGADVMDASAEALRTIARALPQTGVVAWVGTTVSAPIQDIFAALAQVRDFIADPDNARDTRTATLLGSFLEGPYFTAPFRGSHPEKYLTTPTPQELEQLRHSAGNTLLRAAIAPESPEALAAIRWLVNHGIKTSVAHTAANFEQVTAAYQQGADCGVHLYNGMSGLHHREPGCCGAVLYHDMLAELIADGIHVHPVMMNLAYRMKGYRRIALITDCMRAGGLGEGRYLLGAQHITVRQGEARTDDGSLAGSTCSLDQALRNMIQHAQVPEWEAVQMASAVPAAYLGLASTLGSIQMGAQASMVVMESDFTVAATLIKGEWAYRHSA

SEQ ID NO: 77720 - protein, 284 aa, Yersinia pestis
MFLVSSREMLRQAQIGGYAIPAFNIHNLETIQAVVETAAEMASPVILAGTPSTFSYAGTEYLVQICQQAARHYRMPFALHLDHHESYDDITQKVAAGIKSIMIDGSHFNFEQNIALTRQVVEYCHRWDGTVEAELGRLGGQEDDLTVDEKDALYTDPGSAAHFIQATGIDSLAIAIGTAHGMYKEAPSLDFDRLALIRRNTDIPLVLHGGSGIPDEDVRRCIELGISKVNVGTELKIAFSGALKAYFLENKGANDPRHYMVPAKAAMKKVIQDKINVCGSAGKR

SEQ ID NO: 77721 - protein, 361 aa, Yersinia pestis
MPINALSKTLLLGLISFAALGEVSAAQYNAVVSAMAQGDEFSSINAALQSAPPDSSPFVIFLKKGVYTERLEVNRDNVTLKGEERDTTVIGANTAAGMLNPQGTKWGTSGSSTVLVNAANFTAENLTIRNDFDFPANQAKAEGDPTKLKDTQAVALLLAEKSDKARFRQVKLEGYQDTLYSKTGSRSYFTDCDISGHVDFIFGSGVTVFDRCNIIARDRRDISPPYGYITAPSTQNTAPYGLIVLNSRLTKEPGVPAKSFALGRPWHPTTAFDDGRYADPAAIGQAVFINTVMDDHIYGWDKMSGKDKQGEKVWFYPQDSRFFEANNQGPGAEINEGRRQLSAEQLKAFTLPMIFPDWTVQ

SEQ ID NO: 77722 - protein, 347 aa, Yersinia pestis
MSALTPASEVILRHSDEFIARHVLFAGDLQDALPAQFDAAGVRVHTNQYHHWQLLSNTLEENVQFGLLATAETLAACDTLIYYWPKSKQEAQFQLANLLSILPVGTDIFVVGENRSGVRSAEEMLADFAQLAKIDSARRCGLYHGRLDKQPEFDADAWWESYQVGGVTVKTLPGVFSRDSLDSGSHLLLSTFNEPFKGSVLDVGCGAGVLASVLAQQSPKIKWTLSDVSAAAIEASRATLAVNNIEAQVIASNVYSDIKGRFEMIISNPPFHDGIQTSLTAAEMLIRGATAHLHVGGKLRIVANSFLPYPALLDAAFGSHEVLAQNGRFKVYQATVGRPPRDPKKKR

SEQ ID NO: 77723 - protein, 529 aa, Yersinia pestis
MSPSEYALEVAKRRTFAIISHPDAGKTTITEKVLLFGHAIQTAGTVKGRGSSHHAKSDWMEMEKQRGISITTSVMQFPYGGCLVNLLDTPGHEDFSEDTYRTLTAVDCCLMVIDAAKGVEDRTRKLMEVTRLRDTPILTFMNKLDREIRDPMEVLDEVERELNIACSPITWPIGCGKSFKGVYHLHKDETYLYQSGKGHTIQEVRIVKGLNNPDLDVAVGEDLAKQFRQELELVQGASHEFDHEAFLSGDLTPVFFGTALGNFGVDHMLDGLVEWAPAPMPRKTDTRVVVASEEKFTGFVFKIQANMDPKHRDRVAFMRVVSGRFEKGMKLRQVRTKKDVVISDALTFMAGDRSHVEEAYAGDIIGLHNHGTIQIGDTFTQGEDMKFTGIPNFAPELFRRIRLRDPLKQKQLLKGLVQLSEEGAVQVFRPLSNNDLIVGAVGVLQFEVVSSRLKSEYNVEAVYESVNVSTARWVECHDVKKFEEFKRKNELNLALDGGDNLSYIAPTMVNLNITQERYPDVIFRKTREH

SEQ ID NO: 77724 - protein, 162 aa, Yersinia pestis
MRIGHGFDVHKFGENGSGPLIIGGVRIPYEKGLLAHSDGDVALHAATDALLGAAALGDIGKLFPDTDPAFKGADSRGLLREAYRRILAKGYKLGNLDITIIAQAPKMAPHIPQMRVNLAEDLQCHMDDINVKATTTEQLGFTGRGEGIACEAVVLLVNVEQG

SEQ ID NO: 77725 - protein, 241 aa, Yersinia pestis
MSNFAVSLPEVIAVLPAAGIGSRMLVDCPKQYLTVGGKTIIEHAIFSLLHHPRIQRVIVVIHPQDTQFSRLSVAQDPRISTVYGGDQRANSVMAGLQLAGQAEWVLVHDAARPCLHLDDLSRLLSITECSQVGGILAAPVRDTMKRAEPGIQAIAHTVDRQDLWHALTPQLFPLELLKLCLSRALREGVAVTDEASALEHCGYHPILVTGRSDNIKVTRPEDLALAEFYLTQRQSLNNDSL

SEQ ID NO: 77726 - protein, 213 aa, Yersinia pestis
MPAHQLDDHNQETRSDDENIVWHPHAITRQDREQQHGHQGVVLWFTGLSGSGKSTLAGALEQALFARGVSTYLLDGDNVRHGLCRDLGFSDADRRENIRRVGEVAKLMVDAGLVVLTAFISPHRAERKMVQDMLASGQFIEVFVDTPLAICEARDPKGLYKKARAGELKNFTGIDSVYESPASPDIHLQGEQLVTNLIEQLLDVLRGRAIIKS

SEQ ID NO: 77727 - protein, 472 aa, Yersinia pestis
MDYLPLFADLKQRPVLIVGGGEVAARKIELLHRAGAQVWVVAQTLSSELEQQYQDGRIHWLAQDFLPEQLDNVFLVIAATNDTVLNAAVFAAADQRCILANVVDDQPLCSFIFPSIVDRSPLVVAISSSGQAPVLARILREKLEALLPTRLSDMAAIAGRWRGRVKQHMASMGERRRFWEHAFSGRFASLISRGQLTEAENELQLSLEGQHRALGEVALVGAGPGDAGLLTLRGLQVMQQADVVLYDHLVSPEVLDLVRRDAERICVGKRAGAHSVTQEATNQLLVTLAQQGKRVVRLKGGDPFIFGRGGEELQVVAQAGIPFQVVPGVTAAAGATAYAGIPLTHRDHAQSVTFITGHCRPDGDDLDWQTLARGRQTLAIYMGTVKAAAISQQLIAHGRSSTTPVAVIGRGTRVDQQVLIGTLAQLESLAQQAPTPALLVIGEVVNLHHQIAWFGQQPQTESAISPSVVNLA

SEQ ID NO: 77728 - protein, 686 aa, Yersinia pestis
MSKFPPLSAKVSALLHGADYNPEQWENYPDIIDKDIAMMKQAKCNVMSVGIFSWVKLEPSEGEYNFSWLDELIEKLYAAGIHIFLATPSGARPAWMSQKYPEVLRVGRDRVPALHGGRHNHCMTSPVYRQKVRQINQKLAERYAHHPAVIGWHISNEYGGECHCHSCQQKFRLWLQDRYQTLDNLNEAWWSAFWSHTYSDWSQIESPAPQGEVSIHGLNLDWRRFNTAQVTEFCSEEAKPLKAANPELPVTTNFMEYFYDYDYWKLAQVIDFISWDSYPMWHREKDETQLACYTAMYHDLMRTLKQGRPFVLMESTPSATNWQPTSKLKKPGMHILSSLQAVAHGADAVQYFQWRKSRGSVEKFHGAVVDHVGHIDTRVGREVSELGRILEAMSPVMGSKVDADVAIIFDWESRWAMDDAEGPRNCGLEYEKTVAEHYRPFWERGIAVDIINADCDLSGYKLVIAPMLYMVREGFAERATRFVEQGGQFVATYWSGIVNESDLCHLGGFPGPLRPLLGIWSEEIDCLADGESNQVQGLAGNKAGLQGPYQAIHLCDLIHLEGATAVARYRDDFYADRAAVTVNFVGEGKAWYVASRNDAAFQRDFFMNIAEELNLARALDTQFPYGVTAHRRTDGESEFIVVENYSNDSKSLVLPAVYRDMVDQQPVQGSLTLAPWGSRVLTRYLE

SEQ ID NO: 77729 - protein, 460 aa, Yersinia pestis
MAKAPKRAFVCNECGADYPRWQGQCSACNAWNTITEVRLAAVASSSRNDRFVGYAGDAGVSRVQKLSDISLEELPRFSTGFLEFDRVLGGGVVPGSAILIGGNPGAGKSTLLLQTLCKLSENMKTLYVTGEESLQQVAMRAHRLGLPTAGLNMLSETSIEQICLIAEQEQPRLMVIDSIQVMHMADIQSSPGSVAQVRETAAYLTRFAKTRGVAIVMVGHVTKDGSLAGPKVLEHCIDCSVMLDGDGDSRFRTLRSHKNRFGAVNELGVFAMTEQGLREVSNPSAIFLSRGDEVTAGSSVMVVWEGTRPLLVEIQALVDHSMMSNPRRVAVGLEQNRLAILLAVLHRHGGLQMSDQDVFVNVVGGVKVTETSADLALLMSLVSSLRDRPLPQDLVVFGEVGLAGEIRPVPSGQERISEAAKHGFKRAIVPYANMPKKPLPNMQVFGVKKLADALAVLEDL

SEQ ID NO: 77730 - protein, 119 aa, Yersinia pestis
MSTTLFKDFQFEAAHRLPHVPEGHKCGRLHGHSFMVRLEVTGEVDAHSGWVMDFAALKAVFQPIWERLDHHYLNDIPGLENPTSEVLARWIWQQLKPQLPELSAVMIKETCSAGCVYRG

SEQ ID NO: 77731 - protein, 431 aa, Yersinia pestis
MSKIVKVIGREIIDSRGNPTVEAEVHLEGGFVGLAAAPSGASTGSREALELRDGDKSRFLGKGVLKAVAAVNGPIAQAVIGKDAKDQANIDKIMIDLDGTENKSQFGANAILAVSLAAAKAAAASKGMPLYEHIAELNGTPGKFSMPLPMMNIINGGEHADNNVDIQEFMIQPVGAKTLKEAVRIGSEVFHHLAKVLKAKGLNTAVGDEGGYAPNLGSNAEALAVIAEAVKAAGYELGKDITLAMDCAASEFYKDGKYVLAGEGNKAFTSEEFTHFLEDLTKQYPIVSIEDGLDESDWAGFKYQTEVLGDKIQLVGDDLFVTNTKILKEGIEKGVANSILIKFNQIGSLTETLAAIKMAKDAGYTAVISHRSGETEDATIADLAVGTAAGQIKTGSMSRSDRVAKYNQLIRIEEALGDRAPFNGLKEVKGQ

SEQ ID NO: 77732 - protein, 545 aa, Yersinia pestis
MTTNYIFVTGGVVSSLGKGIAAASLAAILEARGLNVTIMKLDPYINVDPGTMSPTQHGEVFVTEDGAETDLDLGHYERFIRTKMTRRNNFTTGRIYSEVLRKERRGDYLGATIQVIPHITNAIKERIIEGGEGHDVVLVEIGGTVGDIESLPFLEAIRQMAVDVGREHTLYMHLTLVPYLAAAGEVKTKPTQHSVKELLSIGIQPDVLICRSDRAVPANERAKIALFCNVPEKAVISLKDVDSIYKIPGLLKSQGLDDYICKRFSLTCPEANLAEWEQVLYEESNPGGEVTIGMIGKYVELPDAYKSVIEALKHGGLKNRLTVNIKLIDSQDVETRGEEMLKELDAILIPGGFGYRGVEGKVLAARYAREHNIPYLGICLGMQVALMEFARNVAGMENANSTEFVPDCKYPVVALITEWRDEDGNVEIRTEESDLGGTMRVGGQQCHLTEGSLVRQMYGEPTIVERHRHRYEVNNMLLKQIEAAGLRVAGRSADNKLVEIIELPDHPWFVACQFHPEFTSTPRDGHPLFAGFVKAAGDYQKRQVK

SEQ ID NO: 77733 - protein, 280 aa, Yersinia pestis
MTQPVTSPDSTAVALQRLLDIMRALRDPEQGCPWDRKQTFDTIAPYTLEETYEVLDAIARKDFDDLRDELGDLLFQVVFYAQMGQEQGLFTFDDVCHAISDKLERRHPHVFSDTSQNVTQAAVNREAALAGWESRKAEERAEKALYSALDDIPDALPALMKAHKIQKRCASVGFDWNTLGPVLDKVYEEIDEVMFEARQAVVDEDKLGEEIGDLLFATVNLSRHLGHKAENALQAANRKFERRFRQVEQIVTASGQTMESATLDEMEAAWQQVKKQETEM

SEQ ID NO: 77734 - protein, 744 aa, Yersinia pestis
MVAVRSAHLNPAGEFALDDWIASLGLANPQSSERLAETWRYCEQQTQNHPDASLLLWRGLEMVEILSTLSMDNDSMRAALLFPLVDANIVDETTLTEQFGKGITYLVHGVRDMDAIRQLKATHNDSMSSEQVDNVRRMLLAMVEDFRCVVIKLAERIAHLREVKDAPEDERVLAAKECSNIYAPLANRLGIGQIKWELEDFCFRYLHPDEYKKIAKLLHERRIDREQFIDDFVASLHKAMADEGIKADIYGRPKHIYSIWRKMQKKSLAFDELFDVRAVRVVVERLQDCYAALGIVHTHFRHLPDEFDDYVANPKPNGYQSIHTVVLGPRGKTLEIQIRTRQMHEDAELGVAAHWKYKEGAVAAGRSSYEGRIAWLRKLIAWQEEMADSGEMLDEVRSQVFDDRVYVFTPKGDVIDLPAGSTPLDFAYHIHSDVGHRCIGAKISGRIVPFTYQLQMGDQIEIITQKQPNPSRDWLNPNLGYITTSRGRSKIHNWFRKQDRDKNILAGRQMLDDELEHLDISLKEAEKLLVPRYNMNSMDEVLAAIGGGDIRLNQMVNFLQGKLNKPTAEEADLEALRHLNNKHQPAPRNASKDSGRIVVEGVGNLMHHIARCCQPIPGDQIIGFITQGRGISIHRADCEQLAELESHAPERIVDAVWGESYSSGYSLVVRVTANDRSGLLRDITTILANEKVNVLGVASRSDTKKMVATIDMDIEIYNLQVLGRVLAKLNQLPDVIDARRLHGN

SEQ ID NO: 77735 - protein, 481 aa, Yersinia pestis
MKKTTLVLSALALSIGFAMGPVSSVVAAETAASSSQQLPSLAPMLEKVMPSVVSINVEGSAPVSSAGARGMPPQFQQFFGDNSPFCQDGSPFQGSPMCQGDLGGLGQGMPSKREFRSLGSGVIIDAGKGYVVTNNHVVDNANKISVKLSDGRSFDAKVIGKDPRTDIALLQLKDAKNLTAIKIANSDQLRVGDYTVAIGNPYGLGETVTSGIVSALGRSGLNVENYENFIQTDAAINRGNSGGALINLNGELIGINTAILAPDGGNIGIGFAIPSNMVKNLTSQMVEFGQVKRGELGIMGTELNSELAKAMKVDAQKGAFISQVVPKSAAAKAGIKAGDIIVSMNGKAINSFAGFRAEIGTLPVGSKMTLGLLRDGKPINVDVVLEQSSHSQVESGNLYTGIEGAELSNSDVSGKKGVKVDSVKPGTAAARIGLKKGDIIMGINQQPVQNLGELRKILDAKPPVLALNIQRGDTSLYLLMQ

SEQ ID NO: 77736 - protein, 285 aa, Yersinia pestis
MRSIGWRFFTLGWLILLAGCATDVSLSGKNKSTEANRIQFQRMGSAPESGAADVTSLDLQPGDILLSSSTGINSLGIRIFSLAPVSHAAIYLGEEQVAEATSTGVNIVSLNEAIDHNTAVIAFRYPGLTPEHAAKLREFALDKEGSDYNFGGIVLIAPYMITKRICELPLFNATVRNHCLSLLATVQLGDGGSLTEDQRFFCSQFVLEAYNYAGHPISDSNPVWITPADLLHMREGDSSSFRSNQPLSYIGHLKQRSSLFTGNKGLAMNNADTLLEDKSPRMLSQ

SEQ ID NO: 77737 - protein, 233 aa, Yersinia pestis
MKVGIIGAMEEEVTLLRDRIENRQTLARAGCEIYTGQLNGIDVALLKSGIGKVAAAMGTTLLLEHCQPDLVINTGSAGGLDSSLKVGDIVVSNEVRYHDADVTAFGYEPGQMAGCPAAFVADEDLIALAENCIQQLKLNAVRGLICSGDAFINGAEPLARIRAAFPTVAAVEMEAAAIGHVCYLFNTPFVVVRAISDVADQASHLSFEEFLVVAAKQSTLMIKAMLTTLAQRG

SEQ ID NO: 77738 - protein, 280 aa, Yersinia pestis
MMPLGLFPLPRAAAVLLISLLTLPAQAAERVISLSPSTTELAYAAGLGDKLVAVSAYSDYPESAKKLEHVASWQGINVERILALKPDLILAWRGGNPQRPLDQLAALGIPIFYSDPTHIDQIASDLDKLAQYSPHPEQAHQAAEQFRQHVNTLRDRYARSQPKRTFLQFGTQPLFTSSGHTLQSEVVSLCGGENIFADSRVPWPQVSREQVMTRKPQVIVVSGTQSQVDNVSAFWLPQLVVPVIALNEDWFNRASPRILLAAQQLCQQMASIPTPVAESH

SEQ ID NO: 77739 - protein, 665 aa, Yersinia pestis
MSAISLRQGWRLPAGLLGLLVVIAVSLTFYNLSQLLPSSLWSEALWRPDRDDVRQMLFHYSQLPRLAVALLTGAGLGLVGVLFQQVLRNPLAEPATLGVAAGAQLGLTIATLWMLPGGELTRQLAAMAGGMTVGALVFGVAWGKRLSPVTLILAGLVLGLYCSAVSNLLALFNYDQLQGLFLWSSGALNQQDWSTVQFLLPRLLISGILAAFLIRPLTLLGLDDGVARNLGLGLSLARLSALGLAIIFSAMLVNAVGVIGFIGLFAPLLAKILGARRLSQRLILAPIVGALLLWVTDQGIIWLTQVWREIPTGAATALIGAPLLLWLLPRLHSTTAPNMDLGDSVPVERQRLGLWISAGLLLLLGGLIVALMFGRDSQGWRWIVGDELQALLHWRWPRVLAALAAGMMLAVAGTLIQKLTGNPMASPEVLGISSGAAFGVVIMLFIVPGNALEWLLPAGSLGAAITLLLIMVVAGRGGFSPGRMLLAGIALSTAFTTVITMLLASGDPRMRGLLAWISGSTYSVEGSQALTTGLIAVVLIALAPLCRRWLMILPLGSVTARALGMALAPSRLAILLLAATLTAAATLTVGPLSFVGLMAPHMARMLGFRRAIPQLIIAAILGGLLMILADWCGRMLLFPNQIPAGLLATFIGAPYFVYLLRKQGR

SEQ ID NO: 77740 - protein, 264 aa, Yersinia pestis
MDLQASHSSTFILRELSFSVPGRTLLQPLSLTFPQGKVCGLIGHNGSGKSTLLKMLGRHQPPSSGQVVLNDMPLAQWDSKAFAREVAYLPQQLPAAEGMTVRELVAIGRYPWHGALGRFRQEDRQQVEEAIALVDLKPLANRLVDSLSGGERQRAWLAMMVAQNSRCLLLDEPTSALDIAHQVEVLGLIQRLSHERGLTVIAVLHDINMAARYCDHLVALRGGEMIAQGPADSLMQSAVLEQIYGIPMGILPHPAGGAPVSFVY

SEQ ID NO: 77741 - protein, 824 aa, Yersinia pestis
MSGDDREPIGRKGKKAQPKAAPKRPLRRRRDEDEYEEDYDEEQNDYDDEEEPMPRKVASRPPRKKRRWLGLLIKLFLIGAVALAIYGVYLDSQIRSRIDGKVWQLPAAVYGRMVNLEPGMSYSKKEMIALLEGMQYRQVSRMTRPGEFTVQNDSIDILRRPFDFPDGKEGQIRARLLFKNDRLAQIQNLDNQRDFGLFRLDPKLITMLQSPNGEQRLFVPRAGFPDLLVDTLLATEDRHFYEHDGVSPYSIARAVVANLTAGKAVQGGSTLTQQLVKNLFLTNERSLVRKLNEAYMALLMDYRYSKDRILELYLNEVYLGQSGGDQIRGFPLGSLYYFGRPVDELSLDQQAMLVGMVKGASLYNPWRNPKLALERRNLVLRLLQNQGIIDAELYTMLSARPLGVQPKGGVITPQPAFMQMVRQELQQKLGNKVNDLSGVKIFTTLDPVSQDAAEKAIEDGVPALRAARNMNDLEAAMVVVDRFSGEVRAMVGGSQPQFAGFNRAMQARRLVGSLAKPPTYLAALSEPDKYRLNTWLSDQPLSLKLSNGSLWQPKNYDRQFRGQVMLMDALVNSLNIPTVNLGMSVGLDQISATLQRLGIPKSVINPVPAMLLGAIDLTPVEVAQEYQTIASGGNRAPLSAVRSVIAEDGTVLYQSFPQAERMVPAQASYLTLYAMQQGVVRGTSRSLSAKFGKYNLAAKTGTTNDLRDSWFAGIDGKEVTIAWIGRDNNGPTKLTGASGALTLYRRYLENQTPLPLILQPPEGISQMNIDSAGNFVCGEGSGMRVIPVWTENPQALCQGSTPTQDPTKPNDDGVADWIKEMFGQ

SEQ ID NO: 77742 - protein, 505 aa, Yersinia pestis
MSEQKPQVAEQAQELNSELQARREKLAVLRGKGIAFPNDFRRENLSDQLHAEFDSKENEELEALNIDVTVAGRMMTRRIMGKASFVTLQDVGGRIQLYVSRDDLPEGVYNEEFKKWDLGDILGARGKLFKTKTGELSIHCSELRLLTKALRPLPDKFHGLADQETRYRQRYLDLIANDESRHTFKVRSQVMSGIRSFMVEKGFMEVETPMMQVIPGGASARPFVTHHNALDIDMYLRIAPELYLKRLVVGGFERVFEINRNFRNEGVSPRHNPEFTMMELYMAYADYKDLIVLTEELFRTLTETILGSSVVQYGEQTFDFGKPFAKLTMKEAICKYRPETNVADLDDMDKAVAIAESLGIKVEKSWGLGRIQCEIFEETAESHLIQPTFITEYPAEVSPLARRNDDNPFITDRFEFFIGGREIGNGFSELNDAEDQAQRFADQVSAKEAGDDEAMFYDEDYITALEHGLPPTAGLGIGIDRMVMLFTNSHTIRDVILFPAMRPVK

SEQ ID NO: 77743 - protein, 366 aa, Yersinia pestis
MFEINPVKNRIQDLSDRTAVLRGYLCDYDAKKERLEEVNAELEQPDVWNEPERAQALGKERSTLEEIVTTIDQLEQGLEDVSGLLELAVEADDEETFNETIAELEVLDGKLGQLEFRRMFSGEYDRANCYLDLQAGSGGTEAQDWASMLLRMYLRWAESRGFKTEIIEESDGDVAGLKSATVKIIGEYAFGWLRTETGVHRLVRKSPFDSGGRRHTSFSSAFVYPEVDDDIDIEINPADLRIDVYRASGAGGQHVNKTESAVRITHIPTNIVTQCQNDRSQHKNKDQAMKQLKAKLYEFEMQKKNADKQVLEDNKSDIGWGSQIRSYVLDDSRIKDLRTGVETRNTQAVLDGDLDKFIEASLKAGL

SEQ ID NO: 77744 - protein, 577 aa, Yersinia pestis
MTLKTQLRRREAADDSHLPAQLPPLLRRLYASRGVKDAQELERGVKGLLAWQKLDGIDAGVTLLQQALADRRRIVIVGDFDADGATSTALAVLALRSMGGSNLDYLVPNRFEDGYGLSPEVVEQVAARGAELIVTVDNGISSHAGVDLAHAKGIQVLVTDHHLPGETLPAADAIINPNLAGCDFLSKSLAGVGVTFYLMLALRARLRECGWFEQRTLAVPNLAELLDLVALGTVADVVPLDANNRILVHQGLSRIRAGKCRPGIRALLEVANRDARQLVANDLGFSLGPRLNAAGRLDDMSIGVALLLSDDIAQARALAIDLDTLNQTRREIEQGMQVEALQLCDQLERTSSELPYGIAMYHPEWHQGVVGILASRIKERFHRPVIAFAPAGEGLLKGSGRSVAGLHMRDALERLDTLNPGLILKFGGHAMAAGLSLEEGKFDEFRQRFADLVGEWMDASQLEGVIWSDGELNGAELSLETAELLRDGGPWGQSFPEPTFDGKFRILQQRLVGERHLKLMVEPLNGGPLLDGIAFNVDTTLWPDSSVREVKLAYKLDINEYRGNRSVQLLVQHLWPY

SEQ ID NO: 77745 - protein, 238 aa, Yersinia pestis
MKKSLLLLPMLMAALSGVANADDSAIQQTLKKLDIQQADIQPSPIPGISTVMTESGVLYISADGKHLLQGPLYDVSGDQPINVTNQALLKKLEALSSEMIVYKAPEEKHVITVFTDITCGYCRKLHEQMKDYNALGITVRYLAFPRQGLSSQAEKDMRSIWCMADRNKAFDDAMKNNDISPATCKTDISKHYQLGVQFGIQGTPAIVLQNGTIVPGYQGPKEMLQMLNAHQASLKAGG

SEQ ID NO: 77746 - protein, 299 aa, Yersinia pestis
MKQQDNPLIEQFLDALWLERNLAENTLASYRLDLHALVGWLTHHNSDLLRASPQDLQSFLAERIEGGYKATSSARLLSAMRRLFQYLYREKLREDDPTALLSSPKLPQRLPKDLSEAQVDALLNSPNVDIPLELRDKAMLEVLYATGLRVSELVGLTISDVSLRQGVVRVIGKGNKERLVPLGEEAVYWIENYMEHGRPWLVNGASLDVLFPSNRSQQMTRQTFWHRIKHYAILAGIDSERLSPHVLRHAFATHLLNHGADLRVVQMLLGHSDLSTTQIYTHVATERLRQLHQQHHPRA

SEQ ID NO: 77747 - protein, 492 aa, Yersinia pestis
MLKGVQVMFKSVLFWKIVTLLGLMLLMMIPKGMLLHVIDERSGYRQSVIDKVSDSTSRSQKILGPLIVVPYREWVETEVDGKKQGKWTHFYHYILPNVMTVKGTPDVEVRQLGIYKTQVYQGEFDFHGEFEVSSLDDLDREGVIIGKPSLVLALSDARGIQRISPLSVGKTKINFEPGAFSGHSVQGVHAPLTIEQVLQGKFDVDFTMSLAGTTSLSVVPVGRNSELTLQSNWPHPNFVGNFLPLQRKVDEKGFRAHWSSNWLANSMNTNFTGGDAAFHFGSLPAFTTSLIEPVDHYQLTERAIKYAILFIGLTFFSFFLFESLTSLRLHPMQYLLVGAALVLFYLMLLAFSEHIGFTLAYLLASLSCSLLIAIYLSAVLGGWLRGTLFACGLLLLYGILFGLLQSEDNALLLGAGLLFVVLTVVMLLTRRLDWYQVADTQRLTEWRAPEPSAEESPSKTAPEGESMKDDNKKKDDHVKKDANEKDEFRLWK

SEQ ID NO: 77748 - protein, 141 aa, Yersinia pestis
MAQWRCNLRVSWHTQLFSLLAHGILVILTLVAPWPLGYTALWLVLLTLVVFECIRSQKRIKSCQGEIRLKPGNLVRWKRHEWTVVKPPWITRYGVLLHLQQTGGHATRKRLWLSADSMSEDEWRQLCLLLRHSFESDDGTM

SEQ ID NO: 77749 - protein, 88 aa, Yersinia pestis
MEIDNKARIHWACRRGMRELDISIMPFFEYEYDSLSDNEKQAFIRLLECDDPDLFNWLMNHGEPQDSELYQMVKLIQSRNKARGPVAM

SEQ ID NO: 77750 - protein, 330 aa, Yersinia pestis
MAYHTPFAAQPPVASSGLPLTLISLDDWALVTLTGADRVKYLQGQVTADIDALSADQHVLCAHCDAKGKMWSNLRLFYRGEGLAFIERRSLLDNQLSELKKYAVFSKVVIEPQPDAVLIGVAGSQAKTALAEIFTELPSAEHPVTQMGNSTLLHFSLPAERFLLVTDTEQAQQLVEKLAGRAQFNDSKQWLALDIEAGFPIIDAANSAQFIPQATNIQALNGISFTKGCYTGQEMVARAKYRGANKRALYWLAGNASRVPAAGEDLEWQLGENWRRTGTVLSAIQLNDGTVWVQAVLNNDLAADSVLRVRDDALGTLAIQPLPYSLAEDK

SEQ ID NO: 77751 - protein, 233 aa, Yersinia pestis
MKNKSGTQPLFATPSVPAAQTATPTPAYPWAEELANSLSHGIGVVFGIVGLVLLLVQAVNSGADTKALTSYSLYGSSIILLFLASTLYHAIPHRRAKLWLQKFDHCAIYILIAGTYTPFLLVGLDSPLARGLMAVIWGLALIGVIFKLAFAHRFEVLSLVTYLTMGWLSLIVIYQLAVKLEIGGLALLAIGGLLYTVGVIFYASKRIRFGHAIWHGFVLGGSVCHFMAIYLYV

SEQ ID NO: 77752 - protein, 959 aa, Yersinia pestis
MTQNLSQLEHNDAFIQRHIGSSVEQQQQMLAAVGASSLSTLIQQIVPADIQLPGPPPVGEAATEHQALAELKGIASQNQCYKSYIGMGYSPVLTPPVILRNMLENPGWYTAYTPYQPEVSQGRLEALLNFQQLTQDLTGLDLASASLLDEATAAAESMALAKRASKLKDANRFFVADDVHPQTLDVVLTRAETFGFDVIVDRAEKVLELDGIFGVLLQQVGTTGELHDYSALLAELKKRKIITSVAADIMALVLLTAPGAQGADVVFGSAQRFGVPMGYGGPHAAFFACRDEFKRSMPGRIIGVSRDAAGNTALRMAMQTREQHIRREKANSNICTSQVLLANIASLYAVYHGPQGLQRIAGRIHRMTDILAAGLQHAGLTLRFKHWFDTLTVEVKDKAAVLARALSFGINLRTDIHGAVGITLNETTSREDIQTLFALFVGDNHGLDIDQLDAAVSQHSQSIQDSMLRRDPILTHPVFNRYHSETEMMRYMHRLERKDLALNQAMIPLGSCTMKLNAAAEMIPITWPEFAELHPFCPPEQAAGYQQMIGQLSQWLVQLTGYDAVCMQPNSGAQGEYAGLLAIRRYHESRNQANRHICLIPSSAHGTNPASAQMAGMSVVVVACDKQGNIDLHDLRQKAEHAGDELSCIMVTYPSTHGVYEETIREVCQIVHQFGGQVYLDGANMNAQVGITTPGYIGADVSHLNLHKTFCIPHGGGGPGMGPIGVKAHLAPFVPGHSVVQIDGMTTQQGAVSAAPFGSASILPISWMYIRMMGADGLKQASQVAILNANYIATRLKNAYPVLYTGHDGRVAHECILDIRPLKEATGISEMDIAKRLIDFGFHAPTMSFPVAGTLMVEPTESESKVELDRFIDAMLAIRAEIEKVAQGEWPLEDNPLVNAPHTQAELVGEWTHPYSRELAVFPVAGVLENKYWPTVKRLDDVYGDRNLFCSCVPISDYE

SEQ ID NO: 77753 - protein, 365 aa, Yersinia pestis
MAKQTPLYDQHVACGARMVDFHGWMMPLHYGSQIDEHHFVRQDAGMFDVSHMTIVDLHGNRTREFLRYLLANDVAKLTQPGKALYTGMLNESGGVIDDLIVYFLSEDYFRLVVNSATRDKDLAWISQHAEPYQVEVTVRDDLALIAVQGPQAQQKVATLLTTEQQQAIAGMKPFFGIQTGDLFIATTGYTGEAGYEIALPKQQVVAFWQQLLAAGVKPAGLGARDTLRLEAGMNLYGQEMDEKTSPLAANMGWTVAWQPEDRQFIGRAALERQRMKGTEQLVGLIMTEKGVLRNELPVYFFDAAGNQHVGVITSGSFSPTLGFSIALARVPAGIGEHAVVQIRNREMPVRVTKPGFVRAGKAIVL

SEQ ID NO: 77754 - protein, 406 aa, Yersinia pestis
MQSFDIVIAGGGMVGLALACGLQGSGLRIAIIEHQPAPMPLTAPLTGELALRVSAINAASERLLQKIGVWETIQALRASPYHGMEVWDKDSFGKIAFHADEYGFSHLGHIIENQVIQQALWQRASQLPEVTVLAPASFKQVAWGETEAFITLTDDRMLSARLVVGADGAHSWLRQHADIPLTFWDYAHHALVATIRTDEPHQATARQVFHGDGILAFLPFSDPHLSSIVWSLPPERAAELAVLPAEQFNRELAMTFDMRLGQCQLESERQTFPLTGRYARSFAAHRLVLVGDAAHTVHPLAGQGVNLGFMDVAELVSELRRLQRQGKDIGQHLYLRRYERRRKHSAAMMLASMQGFRDLFAGNNPAKKLLRDIGLTLADHLPGVKPQLVRQAMGLNDLPEWLERSQ

SEQ ID NO: 77755 - protein, 198 aa, Yersinia pestis
MPQNPQHALERQRIRAEIREHRRLLTPVQQQQSAHLAAQHIAEHPKIQQAHTVAVFLSFDGELDTQPIIEQLWQQKKQVYLPVLHPFSPGNLLFLRYRPESPLIRNRLKILEPQLDVREVLPLHQLDVVITPLVAFDRHGQRLGMGGGFYDRTLQRWQQNGPYPIGLAHDCQLVDKLPSEYWDVPLPEIVTPAKVWQW

SEQ ID NO: 77756 - protein, 302 aa, Yersinia pestis
MKRPDYRTLQALDAVIRERGFERAAQKLCITQSAVSQRIKQLENLFGQPLLVRTVPPRPTEQGQKLLALLHQVELLEEEWLGNDNGVDTPLLLSLAVNADSLATWLLPALKPVLADLPIRLNLQVEDETRTQERLRRGEVVGAVSIQPQPLPSCLVDQLGALDYLFVASKAFAERYFPNGVTRSALLKAPAVAFDHLDDMHQAFLQQNFDLSPGSVPCHIVNSSEAFVQLARQGTTCCMIPHLQIEKELASGELIDLTPGLLQRRMLFWHRFAPESRTMRKVTDALLSYGRQVLRQDSFIGQ

SEQ ID NO: 77757 - protein, 259 aa, Yersinia pestis
MKLKTLALAAMIGLGTLPLALQAQAAEVPEGPHVVTSGTASVEATPDIATIAIEVSVSAKDAADAKKQVDTRVAQYFDFLNKSGIEKKDVKAANIRTQPEYDYQKSGEAVLKGYRAVRQVQVTLRQLDKLNDLLDGALKSGLNEIRAVELGVASPETYREQARKKAIENTITQAGALADGFKVKLGPVYSIRYHIANYQPMPVARMYKSAGAASDTAVEQTYEQQTINFDDQVDVVFELQTGANPASIAATANKTVAAQ

SEQ ID NO: 77758 - protein, 289 aa, Yersinia pestis
MEELNVVEGINNASTWLANNQDLLIQYAVNIIAALLILIVGSIIAKVLSGMLNRVMRLRGIDVTVADFLSAMVRYSILAFTIVAVLGRLGVQTASVIAVIGAAGLAVGLALQGSLSNFAAGVLLVAFRPFKAGEYVDLGGVAGTVVQVQIFSTTLRTVDDKIIVVPNGKIIANNIINTSREPNRRTDMIVGVAYDADIDVVKKVLGDIIAADSRIIHEKGVTVRLNEMAPSSLNFAVRVWTTNGDAQEVFWDLTENFKRALDAHKIGIPYPQMDVHLHQVAKAEAEKPE

SEQ ID NO: 77759 - protein, 387 aa, Yersinia pestis
MSVIKMTDLDLAGKRVLIRADLNVPVKEGKVTSDARIRASLPTIEAALKQGAKVMVTSHLGRPTEGEYNEEFSLLPVVNYLKEKLSSPVRLAKDYLDGVEIAAGELVVLENVRFNKGEKKDDEALSKKYAALCDVYVMDAFGTAHRAQASTHGVGKFAPIACAGPLLSAELEALGKALGNPARPMVAIVGGSKVSTKLTVLGALSKIADKLIVGGGIANTFVAAQGHNVGKSLYEADLIPEAKRLLETCDIPVPTDVRVATEFSETAAATLKPANEIKDDEQILDLGDESAERLAEILKNAKTILWNGPVGVFEFPNFRKGTEIVARAIAESEAFSIAGGGDTLAAIDLFGIADQISYISTGGGAFLEFVEGKKLPAVVMLEERAKQ

SEQ ID NO: 77760 - protein, 113 aa, Yersinia pestis
MAYIPKNYSRLESGYREKALKIFPWVCGKCSREFVYSNLRELTVHHIDHDHGNNPEDGSNWEMLCLFCHDHEHSKYTEVDLYGSTVVAGDDAQKDQGVATHNPFANLKSLMKK

SEQ ID NO: 77761 - protein, 664 aa, Yersinia pestis
MSSRKELANAIRALSMDAVQKAKSGHPGAPMGMADIAEVLWRDYLNHNPTNPHWADRDRFVLSNGHGSMLIYSLLHLTGYDLPMEELKNFRQLHSKTPGHPEYGYTAGVETTTGPLGQGIANAVGFAIAERTLGAQFNRPGHDIVDHHTYAFMGDGCMMEGISHEVCSLAGTMKLGKLTAFYDDNGISIDGHVEGWFTDDTAARFEAYGWHVVRGVDGHNADSIKAAIEEAHKVTDKPSLLMCKTIIGFGSPNKAGTHDSHGAPLGEAEVAATREALGWKYPAFEIPQDIYAAWDAKEAGKAKEAAWNEKFAAYAKAYPELAAEFKRRVSGELPANWAVESKKFIEQLQANPANIASRKASQNALEAFGKVLPEFLGGSADLAPSNLTIWSGSKSLSDDLAGNYIHYGVREFGMSAIMNGIALHGGFIPYGATFLMFVEYARNAVRMAALMKIRSVFVYTHDSIGLGEDGPTHQPVEQMASLRVTPNMSTWRPCDQVESAVAWQYALERKDGPSALIFSRQNLAQQPRTAEQLANIAKGGYVLKDCAGQPELILIATGSEVELAVAAADQLTATGRKVRVVSMPSTDAFDKQDAAYRESVLPSAVSARVAVEAGIADYWYKYVGLNGAVVGMTTFGESAPAELLFKEFGFTVENVVAKAQALLK

SEQ ID NO: 77762 - protein, 107 aa, Yersinia pestis
MNQPIWWFRTYGVSGTVIINFMEALMGILSWIIFGLIAGILAKWIMPGEDGGGFIMTIILGIIGALVGGYISTFFGMGRVDGFNLGSFVVAVIGSLVVLFIYRKLRS

SEQ ID NO: 77763 - protein, 106 aa, Yersinia pestis
MGWFSVCKVNDIKPDFPFSAQAGNNRVGIYLVEGEYFAMEDICPHAYALLSQGINDGEIIECPLHGALFNVRTGQCLREPGDRDLNTYAVRINGDQIDVNLDGDGE

SEQ ID NO: 77764 - protein, 384 aa, Yersinia pestis
MAKHLFTSESVSEGHPDKIADQISDAVLDAILEQDPKARVACETYVKTGMVLVGGEVTTNAWVDIEEITRRTIREIGYVHSDMGFDANSCAVLSAIGKQSPDINQGVDRENPLEQGAGDQGLMFGYATNETSVLMPAPITYAHRLVERQAEVRKNGALPWLRPDAKSQVTFQYDDGKIVGIDAVVLSTQHSEDINQKDLHEAVMEEIIKPVLPAEWITAHTKYFINPTGRFVIGGPMGDCGLTGRKIIVDTYGGMARHGGGAFSGKDPSKVDRSAAYAARYVAKNIVAAGLADRCEIQVSYAIGVAEPTSIMVEAFGTEKIPADQLTLLVREFFDLRPYGLIKMLDLLHPIYRETAAYGHFGREHFPWEKTDKAALLRDAAGLK

SEQ ID NO: 77765 - protein, 235 aa, Yersinia pestis
MLRNILFLLVLSSPLLPLISHSHGINNFSQAKAVAAKIHQDAPGSFYCGCQIDWQGKKGIPDLNSCGYQPRKNAARAARIEWEHVVPAWQFGHQRQCWQQGGRKNCAKDPVYRQIETDLHNLQPAIGEVNGDRNNFMYSQWNGGSGQYGQCAMKVDFKNKLAEPPVRARGAIARTYFYMRDQYQLRLSSQQSKLFGVWDRQYPVTDWECLRDERIAKTQGNHNPYVQRACQRPKS

SEQ ID NO: 77766 - protein, 243 aa, Yersinia pestis
MRIPRIYHPQPLQANTELALTDEAANHVGRVLRMTEGQSLQLFDGSNQIFDAEIIRADKKNLIVRLAEGQWEDRESPLNLHLGQVISRGEKMEFTVQKSIELGVNVITPLFSARCGVKLDGERLTKKIQQWQKIAIAACEQCGRNTIPEIRDAMQLADWCAESDDSLKLNLHPRASNSINTLPSSLNKVRLLIGPEGGLSADEIAMTSRLGFTDILLGPRVLRTETTALTAITALQVRFGDLG

SEQ ID NO: 77767 - protein, 140 aa, Yersinia pestis
MANRTIIAFDFGTKSIGVAIGQEVTGTARALTAFKAQDGTPDWQQVEKLLKEWQPNLVVVGLPLNMDGTEQPLTARARRFANRLHGRFGVQVALQDERLSTVEARANLFDRGGYRALDKGSVDAASAVIILESWFDEQAG

SEQ ID NO: 77768 - protein, 358 aa, Yersinia pestis
MFSRIKAKRIDLENPDLASDGFNKQDFANKVAASVDHNASDLHLCTGFHPVLRIDGELKTFTDWPKVTAGWLNGLRRHMLSDAQESRLQQQGQVDCAYTTVGSQRLRANIFQQRQGQSIAFRIIPAICPSLTQLAAPPILNQLIQQDNGLILVTGATGSGKSTTLSAMISAINQQQARHIITLEDPIEFIHSSQSCLIQQRELGRHTHCFSRALNGALRQDPDIILLGELRDLETIRLALTAAETGHLVLATLHTRTATQAIDRLIDVFPPEEKAVIRTQLAASLRGVITQKLCRQNGGGRIAVFEILTQTTAVSHLIREGKTYQLPTVIQAGGQWGMQTFEQSIAQRQKQGVLAINH

SEQ ID NO: 77769 - protein, 232 aa, Yersinia pestis
MSTIQQNLQDVRARIATAAHNCGRSPEEVTLLAVSKTKPVAAIEKAIAAGQYAFGENYVQEGVDKIHSFVDNKTLEWHFIGPLQSNKSRLVAENFAWCHTVDRLKIAQRLSAQRPAAMPALNVLIQINISDEQSKAGISLSELPALADSISTLPNLCLRGLMAIPAPEHDYQRQLAVFTQMNQAFLTLKARYPQIDTLSMGMTDDMDAAISAGSTLVRIGTAIFGARVYNAD

SEQ ID NO: 77770 - protein, 312 aa, Yersinia pestis
MIQFHQVSKYFAGKRAVDNLSLQISKGEFTVLIGTSGSGKSTTLKMINRLIEHDEGKIRFAGEEIRNYKPEDLRRRMGYAIQSIGLFPHWTVERNIATVPQLLKWPKDRIRQRVVELLELLHLDPQQFCHRYPHQLSGGQQQRVGVARALAVDPEVLLMDEPFGALDPVTRSALQLEITRIHQLSGRTIVLVTHDIDEALSLADRIVLMDEGRVIQQGTPLEMLAQPANDFVRDFFGRSDLGIKLLSLGRVEQRVRCGETLAGQPILGTTSLREALSLFVSRQTDKLPVADEHGQPLGVLYFADLVANKERV

SEQ ID NO: 77771 - protein, 278 aa, Yersinia pestis
MKPAETKPDNTAVGDVKSIKPGLRFWFWLKDPLCWALLILCGLVFGMTSLQRFFTALFPELDRPIYLQDTFFSLVVAHVLLVLASSSIAVFIGVTTGIAVTRPAGKEFRSVVETVVAMGQTFPPVAVLAIAVPVMGFSEKPAIIALVLYGLLPILQGTIAGIESVSTSIREVAAGVGMSARQILWQVELPLAAPVIVAGIRTSVIINIGTAAIASTVGTKTLGSPIIIGLSGFNTAYVIQGAAVVALLAIITDMIFDRWTRRLSRWRERHSLSAPRTD

SEQ ID NO: 77772 - protein, 197 aa, Yersinia pestis
MQKIVLATGNPGKVRELANLLADFGLDVVAQTELGVESAEETGLTFIENAILKARHAAQTTGLPAIADDSGLAVDALGGAPGIYSARYAGTDASDQENLEKLLVALQNVPDEKRGAQFHCVLVYMRHAEDPTPLVFHGQWPGVIAHQPAGAAGFGYDPIFYVPALGKTAAELTREEKHAVSHRGQALKLMLDALRDA

SEQ ID NO: 77773 - protein, 480 aa, Yersinia pestis
MMSKKKGLTTAAGAPVVDNNNVITAGRRGPMLLQDVWFLEKLAHFDREVIPERRMHAKGSGAYGTFTVTHDITQYTRAKIFSEIGKKTDMFVRFSTVAGERGAADAERDIRGFAMKFYTEEGNWDLVGNDTPVFYLRDPLKFPDLNHVVKRDPRTNLRNPVYKWDFFSQLPEALHQLTIDFSDRGLPKSYRHMHGFGSHTFSLINANNERFWVKFHFRCQQGIENLMDDEAEKLIGSDRESSQRDLYEAIERGDFPRWKLQIQVMPEHEASQTPYNPFDLTKVWPHGDYPLIDVGYFELNRNPENYFAEVEQSSFNPANVVPGISFSPDRMLQGRLFSYGDAARYRLGVNHHQIPVNSAKCPFHNYHRDGAMRVDGNSGNGATYEPNSFGLFQEQPDFSEPPLTLEGAADHWNHREDTDYFSQPRALFNLLSEEEHQRMFTRIAGELSQVPEAIQRRQIALFTQVDPAYGAGVKKALGLN

SEQ ID NO: 77774 - protein, 169 aa, Yersinia pestis
MKKCSIILASVLLATSINAIADTPTPLNQQQPLEKIAPYPQAEKGMSRQVIFLEPQKDESRFKVELLIGKTLNVDCNRHMLGGNLETRTLSGWGFDYLVMDKISQPASTMMACPEDSKPQVKFVTANLGDAAMQRYNSRLPIVVYVPQGVEVKYRIWEAGEDIRSAQVK

SEQ ID NO: 77775 - protein, 376 aa, Yersinia pestis
MAYTTFSQNKNNQLLEPMFFGQSVNVARFDQQKHAIFEKLIEKQLSFFWRPEEIDVSRDRIDYNALPDHEKHIFISNLKYQTLLDSIQGRSPNVALLPLISIPELETWVETWSFSETIHSRSYTHIIRNIVNDPSVVFDDIVTNEEILKRAKDISAYYDDLIEMTSYYHLLGEGTHQVNGKTVVVKLRDLKKQLYLCLMSVNALEAIRFYVSFACSFAFAERELMEGNAKIIKMIARDEALHLTGTQHILNLMRLGEDDPEMAEIAEECQQQCYDLFVLAAQQEKEWAEYLFRDGSMIGLNKEILCQYVEYITNIRMQAVGLGIPFSTRTNPIPWINSWLVSDNVQVAPQEVEVSSYLVGQIDSEVSADDLSDFEL

SEQ ID NO: 77776 - protein, 762 aa, Yersinia pestis
MNQSLLVTKRDGSKERINLDKIHRVIDWAAEGLHNVSVSQVELRSHIQFYDGIKTSDIHETIIKAAADLISRDAPDYQYLAARLAIFHLRKKAYGQFEPPTLFAHVSKMVEMGKYDKHLLEDYTAEEFEQMDTFIDHWRDMNFSYAAVKQLEGKYLVQNRVSGEIYESAQFLYILVSACLFSGYPRETRLDYIKRFYDAISTFKISLPTPIMAGVRTPTRQFSSCVLIECGDSLDSINATSSAIVKYVSQRAGIGINAGRIRALGSPIRGGEAFHTGCIPFYKHFQTAVKSCSQGGVRGGAATLFYPMWHLEVESLLVLKNNRGVEGNRVRHMDYGVQINKLMYQRLLKGGDITLFSPSDVPGLYDAFFADQDEFERLYVKYEQDSSIRKQRVKAVELFSLMMQERASTGRIYIQNVDHCNTHSPFDPKIAPVRQSNLCLEIALPTKPLNDINDENGEIALCTLSAFNLGAIDSLDDLEDLAILAVRALDALLDYQDYPIAAAQRGAMGRRTLGIGVINFAYYLAKNGVRYSDGSANNLTHRTFEAIQYYLLKASNALAREQGACPWFNETTYSQGILPIDTYKKDLDAISNEPLHYDWETLRKEIQTHGLRNSTLSALMPSETSSQISNATNGIEPPRGYVSIKASKDGILRQVVPEYERLKGAYELLWEMPNNDGYLQLVGLMQKFVDQAISANTNYDPTRFPSGKVPMKQLLKDLLTTYKFGVKTLYYQNTRDGADDVQEDIQSSLPGDDDCEGGACKI

SEQ ID NO: 77777 - protein, 891 aa, Yersinia pestis
MSDLAREITPVNIEEELKSSYLDYAMSVIVGRALPDVRDGLKPVHRRVLFAMNVLGNDWNKPYKKSARVVGDVIGKYHPHGDSAVYDTIVRMAQPFSLRYMLVDGQGNFGSVDGDSAAAMRYTEIRMSKIAHELLADLEKDTVDFVPNYDGTEQIPAVMPTRIPNLLVNGSSGIAVGMATNIPPHNLSEVIDGCLAYIEDENISIEGLMEYIPGPDFPTAAIINGRRGIEEAYRTGRGKVYIRARAEVEADAKTGRETIIVHEIPYQVNKARLIEKIAELVKEKRVEGISALRDESDKDGMRIVIEIKRDAVGEVVLNNLYSLTQLQVTFGINMVALSQGQPKLLNLKDILVAFVRHRREVVTRRTIFELRKARDRAHILEALAIALANIDPIIELIRRASTPAEAKAGLIASPWELGNVASMLERAGDDAARPEWLEAEFGIRDGKYYLTEQQAQAILDLRLQKLTGLEHEKLLDEYKELLTLIGELIFILENPDRLMEVIREELVAIKEQYNDLRRTEITANTSDINIEDLINQEDVVVTLSHQGYVKYQPLSDYEAQRRGGKGKSAARIKEEDFIDRLLVANTHDTILCFSSRGRLYWMKVYQLPEASRGARGRPIVNLLPLEPNERITAILPVREYEEGCHVFMATASGTVKKTALTEFSRPRSAGIIAVNLNEGDELIGVDLTDGSNEVMLFSALGKVVRFPEGQVRSMGRTATGVRGINLNGDDRVISLIIPRGDGEILTVTENGYGKRTAVAEYPTKSRATQGVISIKVSERNGKVVGAVQVAPTDQIMMITDAGTLVRTRVSEVSVVGRNTQGVTLIRTAEDEHVVGLQRVAEPEEDDDILDGESSEGEEGSEENAALNAPSDDVADEDTDAEDDTDVEDDNA

SEQ ID NO: 77778 - protein, 217 aa, Yersinia pestis
MNNLNVIIADDHPIVLFGIRKSLEQIEWVNVVGEFEDSTALINNLSKLDANVLITDLSMPGDKYGDGITLIKYIKRHYPDLAIIVLTMNNNPAILSSVLDLDIDGIVLKQGAPADLPKALAALQKGKKFTPESVAKLLEKISANGYGDKRLSPKESEVLRLFAEGFLVTEIARKLNRSIKTISSQKKSAMLKLGVDNDIALLNYLSSVTISQVDKEL

SEQ ID NO: 77779 - protein, 311 aa, Yersinia pestis
MNKEALAKKGAGALALLILSHPAVANNNTDTAGNVTVSTSLGLLNAESIESVYQSSEPNQKLSQLNWEANNTPIVKMDIAWDALPRLTLTAKGWSTLSSGQGVMDNYDWLTPQQTQWSDWSHHEKTNLNYANEIDINAKIWFLKQHNYRVGPILGYQENNQSWTAYGGNFNYNNGANIFTAPDGIVGVGYKQKFDMLYIGLAGSYRYQQLEFNALLKYSNWVNANAYDNHYNRKVSFKDSSKNSSYYSAVIDVGYYFTENTKLFVEAAWNQYSEGRGETQTLNYATGNVGSSKSGIEYQSQTLTVGFQYKF

SEQ ID NO: 77780 - protein, 330 aa, Yersinia pestis
MIRTEHSSSTQESGSTLHRHKRWEKLLHHPAMLPFIGFVVLFVLMSGLNDSFLTVNNLTNVARQVSINAIIAVGMTCAILTGGIDLSVGPVMALSGSIAAGLMLAGIPIPLAMMAALLVGALFGLANGSCIAYLRMPPIIVTLASMGIARGLALLYTGGYPISGLPDMFSFFGRGTVLGIQVPILIMAGVYLFAWIMLNHLSFGRYIYAIGGNEEAARLSGIRVSRYKMLVYVVSGLTAALAGLVLTSRLMSGQPNAGEGFELDAIAAVVLGGAAISGGKGAIIGTLVGAMMLGVLNNGLNLMSVSPYIQNVVKGGIILAAIYLSSVRRK

SEQ ID NO: 77781 - protein, 478 aa, Yersinia pestis
MSYQQLPKDFLWGGAVAAHQVEGGWDKGGKGVSIADVLSGGSHGVDRVMTDGVLEGYRYPNHEAVDFYSHYKEDIALFAEMGFKCFRTSIAWTRIFPHGDEQQPNEAGLQFYDDMFDELLKYGIEPVITLSHFEMPWHLVKEYGGWKNRKVVDFFVKFSEVVMARYKSKVKYWMTFNEINNQRNWKYPLFGYCCSGVVFTEQENPEETLYQVLHHQFVASAKVVKLGHAINPEFKIGCMVAMVPLYPFSCHPDDMMYSVEAMRERYLFGDVHMRGYYPSYILQEWARRGFNIHMEEGDLETLRDGCADYMGLSYYMSNAVSAINPGSGNSLSGFEGSVPNPHVKASDWGWQIDPVGLRYSLSVLYERYQKPLFIVENGFGAIDKVAADGMVHDDYRIAYLKAHIEQMKKAVFEDGVDLMGYTPWGCIDCVSFTTGEYSKRYGFIYVDKNDDGTGTMARSRKLSFDWYKKVIASNGEVL

SEQ ID NO: 77782 - protein, 295 aa, Yersinia pestis
MSLSPSSKNSLPLLPILLLVIAMISIQSGASLAKSLFPLVGAQGITSLRLGIGTLILFVIFKPWRMRFAAGSRLPLLIYGVALGGMNFLFYMSLKTVPLGIAVALEFTGPLAVAMFSSRRAVDFIWVGLAILGLWFLLPLGHNIGTIDLFGAACALGAGACWAIYIISGQKAGGDHGPGTVAVGSLIAALIFCPIGVAYNGMALFDPAILPIALAVAILSTALPYSLEMVALTRLPARTFGTLMSLEPALAAISGLVFLNEHLTLVQWLALASIISASVGASLTIKPKPQLDQVT

SEQ ID NO: 77783 - protein, 94 aa, Yersinia pestis
MTTINVEVRNDQGKGASRRLRAANKFPAIVYGGSEAAISIALDHDTTKNLELKPGFYDSVLTLVIDGKETKVKVQAVQRHAFKPKLTHIDFVRV

SEQ ID NO: 77784 - protein, 585 aa, Yersinia pestis
MAFTLRPYQREAVDATVAYFRRHTTPALIVLPTGAGKSLVIAELAKLARGRVLVLAHVKELVAQNHAKYCAYGLEADIFAAGLQQRQSEGKVVFGSVQSVARNLPLFDSAFSLLIIDECHRISDEDDSQYQQIIQHLRTGNPQLRLLGLTATPYRLGKGWIYQFHYHGITRGDEKALFRDCIYELPLRYMIKHGFLVPPERLDMPVVQYDFSRLTSNSDGLFREADLDRELKQQQRITPHIVSQIIEYAAQRRGVMIFAATVEHAKEVYGLLPKGEAALVSAGTPPTERDALINAFKQQQLRYLVNVSVLTTGFDAPHVDLIAILRPTESISLYQQIVGRGLRLFPGKEDCLILDYAGNPHDLFTPEVGTSKPHSGSQPVQVFCPDCGFANIFWGKCTESGEIIEHYGRRCQGWFEDDQGARAQCDYRFRFKSCPHCGAENDIAARRCHQCQAVLVDPDDMLKAALKLKDALVLRCGGMQLETGQDAKGEWLKATYYDEDGTNTSERFRLTTPAQRMAFEQIFLRPHQRAPGIALKWHTAADIIAQQALLRYPDFVVARRRGQWWQIREKVFDYKGRFRRADALA

SEQ ID NO: 77785 - protein, 235 aa, Yersinia pestis
MRLDKFLSQQLGVSRALVARELRAKRVTIDGEVVKSGAIKLTPEQDVRFDGNPLQQMVGPRYFMLNKPQGYVCSTEDPDHPTVLYFLDEPVAYKLHAAGRLDIDTTGLVLMTDDGQWSHRVTSPRHHCEKTYLVTLEHPLSDDTAQQFADGVQLYNEKSLTKPAQLDVIEPQRVRLTISEGRYHQVKRMFAAVGNRVIELHRERIGDITLDDDLAPGEYRPLTTEEIASVGAPHL

SEQ ID NO: 77786 - protein, 417 aa, Yersinia pestis
MESKVVVPAEGKKITVDAQGKLVVPHNPIIPFIEGDGIGVDVTPAMINVVDAAVKKAYNGERKISWMEIYTGEKSTHVYGKDVWLPEETLDLIRDYRVAIKGPLTTPVGGGIRSLNVALRQQLDLYVCLRPVRYYEGTPSPVKHPELTNMVIFRENAEDIYAGIEWKAGSPEAEKVIKFLREEMGVKKIRFPEQCGIGVKPCSEEGTKRLVRAAIEYAITNDRESVTLVHKGNIMKFTEGAFKDWGYQLAREEFGGELIDGGPWVKIKNPNNGKEIIVKDVIADAFLQQILLRPAEYDVIACMNLNGDYISDALAAQVGGIGIAPGANIGDDCALFEATHGTAPKYAGQDKVNPGSIILSAEMMLRHMGWFEAADLIIKGTEGAIQAKTVTYDFERLMEGAKLLKCSEFGDAIIKHM

SEQ ID NO: 77787 - protein, 167 aa, Yersinia pestis
MSTAKLVKTKPSELLYTRNDVEEHVKVATIKRLNQMVIQFIDLSLITKQAHWNMRGANFVAVHEMLDGFRTALTDHLDTFAERAVQLGGVALGTAQVINDKTPLKSYPTNIHSVQEHLKALAERYAIVANDIRKAITEVEDENSADMFTAASRDLDKFLWFIESNIE

SEQ ID NO: 77788 - protein, 218 aa, Yersinia pestis
MQFEWSAIWPAIPLLLEGAKLTLWISVLGLLGGLIIGVIAGLARAYGGWLSSHIALVFIELIRGTPIVVQVMFIYFALPMMIPLRIDPFSAAVVTIIINSGAYIAEITRGAVLSIHSGFREAGLALGLSQRGTLLYVIAPLALRRMLPPLGNQWIVSIKDTSLFIVIGVAELTRQGQEIIAGNFRAMEIWSAVAVIYLIITLALSFVLRRLERKLKII

SEQ ID NO: 77789 - protein, 399 aa, Yersinia pestis
MQKNRTSHIGLIFILGLLSMLMPLAIDMYLPSMPIIAQEFGVESGRVQMTLSAYVLGFAIGQMFYGPMADSIGRKPVIFWGTLIFALAGMACALVQSVEQLINMRFLHGLSAAAASVVINALMRDMFTKDEFSRMMSFVVLVMTIAPLLAPIIGGALLVWFSWHAIFWTMAGAALVGAVLVALFIQETLPPERRQKFHLRTTIGNFGSLFRHKRVLSYMLASGFSFAGMFSFLSAGPFVYIDLNGVSPQNFGYYFALNIVFLFLMTFINSRNVRRFGALKMFRFGLIVQFVMGIWLVVVCVAGLGFWALVLGVAAYVGCIAMITSNAMAVILDDFPHMAGTASSLAGTLRFGIGAVVGTLLSMASSRSAWPMVSSMAFCIIVAMLLYLYASRPSHKTVS

SEQ ID NO: 77790 - protein, 240 aa, Yersinia pestis
MINFKNVSKHFGKIQVLHDINLNITQGEVVVIIGPSGSGKSTLLRCINKLEVITRGQLIVDGLDVNSPNIDERQIRLEAGMVFQQFYLFPHLTALENVAFGPTKVRGTSKEEAKKQALALLSKVGLEDRAHHYPAELSGGQQQRVAIARALAVKPKLMLFDEPTSALDPELRHEVLTVMKDLAEEGMTMVIVTHEVGFAQKVASRLIFIDKGRIAEDGDPDSLISNPPSERLREFLQHVS

SEQ ID NO: 77791 - protein, 530 aa, Yersinia pestis
MATSPLLDIQNLSVAFSQAGVQREVVSELSLQINAGETLALVGESGSGKSVTALSVLRLLPSPPVVYPTGDILFAGSSLLHADEPTLRRIRGNQISMIFQEPMVSLNPLHNIEKQLAEVLSLHRGMGQEAARAEIIQCLDRVGIRNAKGRLADFPHQLSGGERQRVMIAMAVLTQPKLLIADEPTTALDVSVQAQILSLLKELKQEMNMSLLFITHNLNIVRRLADNVAVMREGRKVEQNNRQALFSAPQHPYTRQLLDAESQDAPLPLAQNTQPLLVVKELQVAFPIKRGLLRRTVDHHYALKSLSFDLKPGESLGLVGESGSGKSTSGLALLRLLPSQGEIWFSGQPLHQFTPKQMLPYRSRIQVVFQDPYSALNPRLNVQQIIAEGLEVHQKLSAAQREERVIKAMEEVGLDPATRSRYPTEFSGGQRQRIAIARALILQPQLLILDEPTSSLDKSVQAQILALLKSLQQRYQLSYLFISHDLQVVRSLCHQVIVLRQGEVVEQGDCQAIFAAPKQLYTQQLLELAD

SEQ ID NO: 77792 - protein, 441 aa, Yersinia pestis
MSVLENRVRLSGLVLMLSGLAAITAPVAAEPSGYTLERVVILSRHGVRSPTKQTQLMNDVTPDKWPQWPVKAGYLTPRGAELVTLMGGFYGDYFRSLGLLAAGCPAEGGVYAQADIDQRTRLTGQAFLDGVAPGCGLTVHNQADLKKTDPLFHPVEAGVCKLDAAQTDKAIEEQLGGPLDTVSQRYAKPFAQMGDVLNFAASPYCKSLQQQGKTCDFAHFAANEVNVNKEGTKVTLSGPLALSSTLGEIFLLQNAQAMPEVAWQRLKGAENWVSLLSLHNAQFNLMAKTPYIARHKGTPLLQQIDTALTLQLDAQGQKLPISAQNRVLFLGGHDTNIANIAGMLGADWQLPEQPDNTPPGGGLVFELWQNPDNHQRYVAVKMFYQTMDQLRNAEKLDLKNNPAGIISVAVAGCENNGDDKLCELDTFQKKVAKVIEPACHI

SEQ ID NO: 77793 - protein, 602 aa, Yersinia pestis
MFLRLFATLILSAMSFGLAAETIKEGVSFAILGDPKYSSDFSHFDYVNPAAPKGGNITLSAIGTFDNFNRYALRGTSAARTERLYDSLFSPSSDEIGSYYPLIAESARYSPDFSWIEVDINPHARFHDGAPITAEDVAFTFNKFMTEGVPQFRLFYKGVKVNAISRLTVRFEFPEPNKDKMLGLLGFPVMPKHFWKDHKLSDPLSTPPVASGPYRISKYKMGQYVTYERVKDYWAANLPVNRGQYNFDTIRYDYYLDDKVALEAFKAGAFDLRTESSPKSWATQYAGGNFAKNYIVKQDITDNSAQNTRWLAFNVQRPLFSDRRVRQALTLAFDFEWMNKAFYFNSYQRANSFFQNTEYAATGYPDSAELAWLAPLKDKIPAEVFTQIYQPPHTDGSGYSRDNLLKAKELLNEAGWEVKDQQLVNSKTGKPFEFELLLPSGSDFQYVQPFKHNLQRLGITMKIREVDSSQFINRLRSRDFDMIPTVYNAFPYPSPDLQILWSSAYIDSTYNRPGIKDPAIDQLIAQIVSHQDQPEALLSLGRALDRVLTWNYLMIPMWYSNHSRFAYWDKLSMPAVRPTYSLGFDSWWFDVNKAARLPVERR

SEQ ID NO: 77794 - protein, 336 aa, Yersinia pestis
MTLLTHLPANMVAIEITQFGGPEVLVPAKRPTPMPAAGEILVKVSAAGVNRPDVMQRRGQYAPPPGASDIPGLEVAGEVVATAADVTRFKIGDNVCGLIAGGGYAQYCVIHETNALPIPQGLSAIEAAALPETFFTVWTNLFQRGHFTAGETVLIHGGSSGIGTTAILLSKAFGAATVIVTVGSEEKRQACLNLGADIAINYHTQDFVAETKRATAGKGADVIVDLIAGDYVARNYDAAAMNGRIVQIGTQNGHAKDLNLMLMLIKRLTHTGSTLRSRTVAEKALIANELEQHVWPLLSEGKMKPQIFSTFPLEAAAKAHELMESSTHIGKIVLTA

SEQ ID NO: 77795 - protein, 266 aa, Yersinia pestis
MVRSIWYFLRQCLMQEIKVMRLYQEVGSQLREAIVSGRYSVGDRLPPERDIAENFSVSRSVVREALIMLELEKLVEVRKGSGVYVVNVPTMSLNGESATSIDSGYGPFELLQARQLLESEVAAFAAMQATKADIIKMRNAIEQGKAALTAGAIDESADELFHCLLAQSTQNSVLANMVAQTWQVRKSSAMWQGAHSHTADFSYRWQWLDDHQKILQAVLRRDSKAAKQAMWQHLENVKLKLLEISDADHPDFDGYLFESAPYQIEE

SEQ ID NO: 77796 - protein, 899 aa, Yersinia pestis
MRKLEKTDANRSNNKKPFAIALEAKNSLEQTLFKLNTHLNGLTEEDARERLELYGINQVAHEKAPPAFLQLLAAFNNPFIFVLIILASISFFTDYWLPLQEGGETDLIGVSIIVTMVLISGLLRFWQEYRTNKAAEALKSMVRTTATVLRRGHYGAKPTQQEIPINQLVPGDIILLSAGDMIPADLRLINSRDLFVSQAILTGEAIPVEKYDAMGCVSSKSVDAGAGSEGELLELSNICLMGTNVASGTAMGVVVATGGHTYFGSLAKSIVGTRAQTAFDRGVNSVSWLLIRFMLVMVPIVLLINGFTKGDWTEAALFALAVAVGLTPEMLPMIVSSNLAKGAIAMARRKVVVKRLNAIQNFGAMDVLCTDKTGTLTQDRIILEHHLDVSGCNDNKVLQLAWLNSFHQSGMRNLMDQAVIKFSRGKPEIEALRNFNKVDELPFDFIRRRLSIVVKDAQQQQHLICKGAVEEMLSICTHVREGDDIFPLDAARRATLQALATQYNEDGFRVLLLATRELGAQVSPVPLNIDDERDLVVQGLLTFLDPPKESAAAAIAALRENGVAVKVLTGDNPIITAKICRDVGLEPGEPLNGRDIEAMDEATLAREVELRTVFTKLTPLQKSRVLKMLQSNGHTVGFLGDGINDAPALRDADVGISVDTGTDIAKESADIILLEKDLMVLEAGVIKGRETFGNIIKYLNMTASSNFGNVFSVLVASAFIPFLPMLAIHLLLQNLMYDISQLSLPWDKMDKEFLRKPRKWDAKNIGRFMLWVGPTSSIFDITTYALMWFVFAANSVEHQALFQSGWFIEGLLSQTLVVHMLRTQKIPFIQSTAALPVLLTTGLIMAIGIYIPFSPLGTLVGLEPLPWQYFPWLAGTLICYCVVAQLMKRFYIRRFGEWL

SEQ ID NO: 77797 - protein, 498 aa, Yersinia pestis
MSEYHEKNNALFKSITALDGALFINGEFRKGAGGRLPVENPATGKVIGHLAAATPEEIEEAVAAARRAFPAWAAERPKARANALHRLGDLIAGDALNMARNMTIEQGKPVNEAQGEILKLAEICHFYGEEATRVQGDVVPNDPPGFQSLVVREPVGVVGAITPWNYPAELVGWKLCASLAAGCTLIIKPAELTPYTALAIAEKCLEAGIPAGVVNVLTGKGEQVGQALVEHPQVDKIAFTGSSAVGLHIQQSCPQVKRLSLELGGNGPMVVTACADVAAAVKGAVRRSFRNCGQVCIAINRIYVHRSCYRAFVSKMGVATNGLRLGNGLDDPAADLGAMASVEPLNKTRAHLEDALAKGARLVAGGKAPEGVEYAKGHFFRPTVLADCTHQMRVMTEETFGPLVGLAPFDDIDEVISRANDTPYGLAAYVYARDLAAIHRLSAALDYGNVAINNVDASMMNAPYGGRKQSGVGYEHGREGLLEYFNFKHIRLYHGIGD

SEQ ID NO: 77798 - protein, 517 aa, Yersinia pestis
MQALLGIDIGTSGCKALLIGIDGAVIAADTASYPLSQPQLGWAEQDPELWVEGARRAVAGALAKAPTLELLCVGLSGQMHGLVSLDAGHQVLRPAILWNDQRNSAECEQITEAAGGLKGLLAATNNRMLVGYTGGKIVWMQQHEPDLFARMTTVLNPKDYLRLRLTGEVATEVSDASGTGLFDVRARQWASDLIENVGIDRALLPPVFESQVISGQVSAVGAELFGIPKGTPVAGGGGDAVIQTFGSGVIAPGELQTTIGTAGILAAALDTPQANPDGRLQVFCHVVADKWHCMGVSLNAGGAMSWFRDTFYVGVNAAVPSFDQFTPSDQITPSFEQIVAEAAASPAGARGLLFLPYLNGERCPHPDPAARGAFIGLTACHNRGDVARAVMEGVVHALVDMHTLMKPLGINGRVVKTSGGGARSPLWRQMQADIFGCDVLTTKGAAEGAAFGAALVAGLAIGVWPDATSATANCRIITREPPNPATAAVVAEAQRIYRTLYPALRETFAELGDPTFM

SEQ ID NO: 77799 - protein, 1231 aa, Yersinia pestis
MVDTVIDNKVKELHQQLAQRILVLDGGMGTMIQSYRLEEADYRGARFADWASDLKGNNDLLVLSKPEVITAIHNAYLEAGADILETNTFNSTSIAMADYQMASLSAEINYEAARLARICADEWSARTPEKPRYVAGVLGPTNRTASISPKVNDPAFRNVSFDQLVEAYRESTRALIEGGVDLIMIETVFDTLNAKAATFAVESEFEVMGVLLPVMISGTITDASGRTLSGQTTEAFYNSLRHVKPLSFGLNCALGPDELRQYVAELSRISEYYVSAHPNAGLPNAFGEYDLEAKEMAEQIGEWARAGFLNIVGGCCGTTPRHIAAMVNAVAGVPPRPLPDIPVACRLAGLEPLTIDANTLFVNVGERTNVTGSARFKRLIKEEKYGEALDVARQQVESGAQIIDINMDEGMLDAEAAMVRFLNLIAGEPDIARVPIMIDSSRWDVIEKGLKCIQGKGIVNSISMKEGVDAFIHHAKLVRRYGAAMVVMAFDETGQADTRARKIEICRRAYKILTETVGFPPEDIIFDPNIFAVATGIEEHNNYAVDFIEACADIKAELPHALISGGVSNVSFSFRGNDPVREAIHAVFLYYAIRNGMDMGIVNAGQLAIYDDLSDELRDAVEDVILNRRDDSTERLLDLAEKYRDSKSGEVAIQQAEWRGWPVVKRLEYSLVKGITEFIELDTEEARQQADRPIEVIEGPLMSGMNVVGDLFGEGKMFLPQVVKSARVMKQAVAYLEPYIEASKQKGTTAGKILLATVKGDVHDIGKNIVGVVLQCNNYEIIDLGVMVPTEKILRTAREEKVDIIGLSGLITPSLDEMVNVAKEMERQGFTLPLLIGGATTSKAHTAVKIEQNYSGSTTYVSNASRSVGVVSALLSDTQREAFVAKTRKEYETVRIQHARKKPRTPPVSLQAARNNPTVIDWENYTPPVAHKLGVQVVEASIETLRNYIDWTPFFMTWSLAGKYPRILEDEVVGEEAKRLLADANALLDKLSAEDLLHPKGVVGLFPANSVGDDIEIYRDERRDEVLAISYHLRQQTEKTDFPNYCLADYVAPKSSGKADYFGAFAVTGGLEEDALADAYDAQHDDYNKIMIKALSDRLAEAFAEYLHERVRKVYWGFAPNENLSNEELVRENYQGIRPAPGYPACPEHTEKGQIWQLLDVETHTGMKLTESYAMWPGASVSGWYFSHPDSKYFAVAQIQRDQVEDYAARKGMPTAEVERWLAPNLGYDAD

SEQ ID NO: 77800 - protein, 165 aa, Yersinia pestis
MAGLATVTKLAGETVGQEFLIFTLGDEEYGIDILKVQEIRGYDQVTRIANTPAFIKGVTNLRGVIVPIIDLRVKFAQQGVTYNENTVVIVLNFGQRVVGIVVDGVSDVLSLTNEQIRPAPEFAVTLATEYLTGLGSLGERMLILVDIEKLLSSEEMSLIDSVSKA

SEQ ID NO: 77801 - protein, 411 aa, Yersinia pestis
MNKWTKLCFLILGGGTIFKLSSMKDVFYIPMQQDWGLTNTQIGFGFTVYAIIQTVGLFSSLYIADRFSKKILLPVGLIGVGLCGAYLATLPPFTGYLIAFGAMAFFGEVVYWPVLLKAVRLLGTKEEQGRMFGFLEAGRGVIDVLIASGALFVFVQFGEGKAGMQAGLIYYTIATILVGVITWFIVDSDDKIKVDNADKVNKHVLAGIKDVIKSPNLWLASFCIFFVYSAYCGLTYFIPFLKDIYGLPVALIGAYGIINQYGLKMVGGPVGGFLADKVAKSPTVYLKWTFLISAIAMILFIQLPHDSMNVYLGMMATLGFGAIIFSQRAIFFAPMDEIGTSREHAGSAMAFGCIIGYMPSMFAYALYGSLLDNFEGIQGYNYIFSLMVAFSLLGFICATILTKRMRAVAVA

SEQ ID NO: 77802 - protein, 435 aa, Yersinia pestis
MTISRTQQIQQLEQEWTSPRWKNITRPYSAEDVIKLRGSVNPECTFAQNGAKKLWELLHGGSRKGYINCLGALTGGQALQQAKAGVEAIYMSGWQVAADANTASSMYPDQSLYPVDSVPAVVKRINNSFRRADQIQWSNNIEPGSKGYTDYFLPIVADAEAGFGGVLNAFELMKAMIEAGAAGVHFEDQLAAVKKCGHMGGKVLVPTQEAIQKLVAARLAADVLGVPTLLIARTDADAADLLTSDCDPYDREFITGDRTAEGFFRTRAGIEQAISRGLAYAPYADLVWCETSTPDLALAKRFADAVHAQFPGKLLAYNCSPSFNWKKNLTDQQIASFQDELSAMGYKYQFITLAGIHSMWFNMFDLAHAYAQGEGMKHYVEKVQQPEFASVDRGYTFASHQQEVGTGYFDKVTNIIQGGASSVTALTGSTEEQQF

SEQ ID NO: 77803 - protein, 233 aa, Yersinia pestis
MINFVKLMCNVKLMCKWGAILMSPFFLSACVTNQLSDDIRGHEKGYTHYNDDIIVGVSLAKQGDNKNWAFVGTHFDYVLSSGADEFLTLLVTGQIDKKKIEVVRDGSFNLNKKKDGFTGKIALKYRYQTAEERGKIEPLIKGADWNCPSLTETTGICNINLNNLVGTIHRKGATPADIFRFEHPLQVKFYSKNTTSAKRALYPVAVAADVVMLPVYLLSAAAVAAFYGVVSLN

SEQ ID NO: 77804 - protein, 614 aa, Yersinia pestis
MNLLYLTILLPLLGFLLLAFSRGRWSENTAATVGVGSIGLTALVTLYVAVDFLSQKATGVQVFNQTLWNWMSVGTFNIPLTLTLDGLSLTMLSVVTGVGFLIHMYASWYMRGEEGYSRFFAYTNLFIASMVVLVLADNLLLMYLGWEGVGLCSYLLIGFYYKHSANGAAAMKAFIVTRVGDVFLAFALFILYQELGTLNIRELMILAPQKLEMGSTAITWATLMLLGGAVGKSAQLPLQTWLADAMAGPTPVSALIHAATMVTAGVYLIARTHGLFLMAPEVLHLVGVIGAVTLVLAGFAALVQTDIKRVLAYSTMSQIGYMFLALGVQAWDAAIFHLMTHAFFKALLFLSSGSVILACHHEQNIFKMGGLRKTIPLVYICFLVGGAALAALPIVTAGFYSKDEILWGALASGHINLMVAGLVGAFLTALYTFRMIFIVFHGEPKTKAHPVKGITHSLPLIVLLVLSTFVGALITPPLAGVLPELHFGDEGKMPLEIFSGVLVVIGIALAAFLYLGKRQLVNSIAQSAPGRFFTVWWFHAWGFDWLYHNLFVRPYLWIAKLLQRDPLNSLMNTPAVLSRWSNRGLTVSENGQVRWYAASIGLGAVIVLALLLFV

SEQ ID NO: 77805 - protein, 129 aa, Yersinia pestis
MADKNLRFLVVDDFSTMRRIVRNLLKELGFHNVEEAEDGVDALNKLRAGGFDFVVSDWNMPNMDGLDLLKTIRTDGALATLPVLMVTAEAKKENIIAAAQAGASGYVVKPFTAATLEEKLNKIFEKLGM

SEQ ID NO: 77806 - protein, 214 aa, Yersinia pestis
MNNHPMPATDAASASDIISRIGSLTRMLRDSLRELGLDQAIAQAAEAIPDARDRLDYVVHMTAQAAERALNCVEAAQPRQNELESSAKALKIRWDEWFANPIELSDARSLVTDTREYLAVVPQHTSFTNAQLLEIMMAQDFQDLTGQVIKRMMDVVQEIEKQLLMVLMENIPDIPSKPQKPTDSLLNGPQMDKNVAGVIASQDQVDDLLDSLGF

SEQ ID NO: 77807 - protein, 461 aa, Yersinia pestis
MTINSGTTKEIIRTPEMHPLTWRLRDDKQPVWLDEYRSKNGYAGAEKALKGMAPTDVVNVVKDAGLKGRGGAGFSTGLKWSLMPKDDSMNIRYLLCNADEMEPGTYKDRLLMEQLPHLLVEGMLISAFALKAYRGYIFLRGEYIEAAVHLRRAIAEATEAGLLGKNIMGSGFDFELIVHTGAGRYICGEETALINSLEGRRANPRSKPPFPASSGVWGKPTCVNNVETLCNVPAIIEHGVEWYQGITAGKSNDAGTKLMGFSGRVKNPGLWELPFGITAREILEDYAGGMRDGLKFKAWQPGGAGTDFLTADHLDLPMDFENIAKAGSRLGTALAMAVDHEIGMVSLVRNLEEFFSRESCGWCTPCRDGLPWSVKILRALERGEGQPGDIETLEQLCRFLGPGKTFCAHAPGAVEPLQSAIKYFRDEFEAGIAVKAYESGMTSGNTRAIAGIQPNLLKARW

SEQ ID NO: 77808 - protein, 172 aa, Yersinia pestis
MVNLAVNAAEPAAMPDAFELSAEERDAIEHEKHHYEDARAASIEALKIVQKQRGWVPDGAIHAIADVLGIPASDVEGVATFYSQIFRQPVGRHVIRYCDSVVCHITGYQGIQAALEKKLSIKPGQTTFDGRFTLLPTCCLGNCDRGPTMMIDDDTHSYLKPEEIEKLLEQYP

SEQ ID NO: 77809 - protein, 215 aa, Yersinia pestis
MATPGFPSTEQRLGLYPVVDSLLWIERLLAAGVTTLQLRIKNADDAQVEQDIVAAIELGKRYQARLFINDYWQLAVKHGAYGVHLGQEDLEAADLAAIQQAGLRLGISTHDEHELAVAKTLRPSYIALGHIFPTQTKQMPSSPQGLASLSRQVKNTPDYPTVAIGGISIERVPHVLATGVGSVAVVSAITLASDWQRATAQLLHLIEGKELADEK

SEQ ID NO: 77810 - protein, 265 aa, Yersinia pestis
MKNDQTLSDSEFLRYSRQLLLEDIGPEGQRKLKGASVLIVGLGGLGSPAALYLAAAGVGQLLLADDDQLDLTNLQRQILYRTADIGQTLSNPTSSVSHNKARLAQRHLQQLNPQIRIVALDTRLTGQVLTDAVANADLVLDCSDNMETRHQVNAACVTAQKPLISGSAVGFSGQLLVIEPPYAQGCYACIYPDKELPQRNCRTAGVLGPVVGVIGTLQALEAIKMLAGIPLALSGKLRLFDGKQQSWSTLQLTRAAHCPACGGGL

SEQ ID NO: 77811 - protein, 333 aa, Yersinia pestis
MTSHWRWSAISPPRCCLINLNTTSREPHWLLIRSLFRAPIGKIIGCKRVIIFCCSKPLPEDDMLKIADTTFTSRLFTGTGKFSSPELMLEALRASGSQLITMAMKRVDLQSGNDAILAPLRQLGVRLLPNTSGAKTAEEAIFAARLAREALNTHWVKLEVHPDVRYLLPDPIETLKAAEVLVKEGFVVLPYCGADPVLCKRLEEVGCAAVMPLGSPIGSNLGLRTRDFLQIIIEQSKVPVVVDAGIGAPSHALEALELGADAVLVNTAIAVAHSPVQMAHAFRLAVESGERARLAGLGASPFNPSQPDTLQLRATATSPLTGFLSQLEEQDHV

SEQ ID NO: 77812 - protein, 1406 aa, Yersinia pestis
MKDLLKFLKAQTKTEEFDAIKIALASPDMIRSWSFGEVKKPETINYRTFKPERDGLFCARIFGPVKDYECLCGKYKRLKHRGVICEKCGVEVTQTKVRRERMGHIELASPTAHIWFLKSLPSRIGLLLDMPLRDIERVLYFESYVVIEGGMTNLERRQILTEEQYLDALEEFGDEFDAKMGAEAIQALLKNMDLEAECEILREELNETNSETKRKKLTKRIKLLEAFVQSGNKPEWMILTVLPVLPPDLRPLVPLDGGRFATSDLNDLYRRVINRNNRLKRLLDLAAPDIIVRNEKRMLQEAVDALLDNGRRGRAITGSNKRPLKSLADMIKGKQGRFRQNLLGKRVDYSGRSVITVGPYLRLHQCGLPKKMALELFKPFIYGKLELRGLATTIKAAKKMVEREEAVVWDILDEVIREHPVLLNRAPTLHRLGIQAFEPVLIEGKAIQLHPLVCAAYNADFDGDQMAVHVPLTLEAQLEARALMMSTNNILSPANGEPIIVPSQDVVLGLYYMTRDCVNAKGEGMVLTGPKEAERIYRAGLASLHARVKVRITEEIRNTEGESITRTSIIDTTVGRAILWMIVPQGLPYSIVNQPLGKKAISKMLNTCYRILGLKPTVIFADQIMYTGFAYAARSGASVGIDDMVIPEAKAGIIEEAETEVAEIQEQFQSGLVTAGERYNKVIDIWAAANERVAKAMMDNLSVEDVVNRDGVVEQQVSFNSIFMMADSGARGSAAQIRQLAGMRGLMAKPDGSIIETPITANFREGLNVLQYFISTHGARKGLADTALKTANSGYLTRRLVDVAQDLVVTEDDCGTHNGIVMTPVIEGGDVKEPLRDRVLGRVTAEEVIKPGSADILVPRNTLLDEKWCDLLEENSVDSVKVRSVVSCETDFGVCANCYGRDLARGHIINKGEAVGVIAAQSIGEPGTQLTMRTFHIGGAASRAAAESSIQVKNKGSLKLSNVKFVTNAAGKLVITSRNTELKLIDEFGRTKESYKVPYGAVMAKGDGAEVQGGETVANWDPHIMPVVTEVSGFIRFADMVDGQTITRQTDELTGLSSLVVLDSAERTGSGKDLRPALKIVDAKGNDVLIPGTDMPAQYFLPGKAIVQLEDGIQIGAGDTLARIPQESSGTKDITGGLPRVADLFEARRPKEPAILAEISGIISFGKETKGKRRLVISPLDGSDAYEEMIPKWRQLNVFEGEVVERGDVVSDGPESPHDILRLRGVHAVTRYITNEVQEVYRLQGVKINDKHIEVIVRQMLRKGTIVDAGSTDFLEGEQAEMSRVKIANRKLAAEGKIEATFTRDLLGITKASLATESFISAASFQETTRVLTEAAVAGKRDELRGLKENVIVGRLIPAGTGYAYHQDRMRRKAQGEAPVVPQVSADEATANLAELLNAGFGNNKG

SEQ ID NO: 77813 - protein, 151 aa, Yersinia pestis
MTIKPSDSVSWFQVLQRGQHYMKTWPADKRLAPVFPENRVTVVTRFGIRFMPPLAIFTLTWQIALGGQLGPAIATALFACGLPLQGLWWLGKRAITPLPPTLLQWFHEVRHKLFEAGQAVAPIEPIPTYQSLADLLKRAFKQLDKTFLDDL

SEQ ID NO: 77814 - protein, 1342 aa, Yersinia pestis
MVYSYTEKKRIRKDFGKRPQVLDIPYLLSIQLDSFQKFIEQDPEGQHGLEAAFRSVFPIQSYSGNSELQYVSYRLGEPVFDVKECQIRGVTYSAPLRVKLRLVIYEREAPEGTVKDIKEQEVYMGEIPLMTENGTFVINGTERVIVSQLHRSPGVFFDSDKGKTHSSGKVLYNARIIPYRGSWLDFEFDPKDNLFVRIDRRRKLPATIILRALNFTTAQILDLFFEKVVFEIRDNKLQMELVPERLRGETASFDIEANGKVYVEKARRITARHIRQLEKDGIDRIEVPVEYIAGKVVAKDYVDASTGELICAANMELSLDLLAKLSQAGHKQIETLFTNDLDHGAYISETLRVDPTSDRLSALVEIYRMMRPGEPPTREAAENLFENLFFSEDRYDLSAVGRMKFNRSLLRDEIEGSGILSKEDITEVMKKLIDIRNGRGEVDDIDHLGNRRIRSVGEMAENQFRVGLVRVERAVKERLSLGDLDTLMPQDMINAKPISAAVKEFFGSSQLSQFMDQNNPLSEITHKRRISALGPGGLTRERAGFEVRDVHPTHYGRVCPIETPEGPNIGLINSLSVYAQTNEYGFLETPYRRVRDGVVTDEINYLSAIEEGNFVIAQANSNLDDEGRFLEDLVTCRSKGESSLFSREQVDYMDVSTQQIVSVGASLIPFLEHDDANRALMGANMQRQAVPTLRADKPLVGTGMERAVAVDSGVTSVAKRGGTVQYVDASRIVIKVNEDEMHPGEAGIDIYNLTKYTRSNQNTCINQMPCVNLGEPIERGDVLADGPSTDLGELALGQNMRVAFMPWNGYNFEDSILVSERVVQEDRFTTIHIQELACVSRDTKLGPEEITADIPNVGEAALSKLDESGIVYIGAEVTGGDILVGKVTPKGETQLTPEEKLLRAIFGEKASDVKDSSLRVPNGVSGTVIDVQVFTRDGVEKDKRALEIEEMQLKQAKKDLTEELQILEAGLFARIHAVLVSGGIEAEKLSKLPRERWLELGLTDEDKQNQLEQLAEQYDEMKSEFEKKMDAKRRKITQGDDLAPGVLKIVKVYLAVKRQIQPGDKMAGRHGNKGVISKINPIEDMPYDENGTPVDIVLNPLGVPSRMNIGQILETHLGMAAKGIGEKINAMLKKQEEVAKLREFIQKAYDLGDNVCQKVDLSTFTDDEVLRLAENLKKGMPIATPVFDGATEKEIKELLQLGGLPTSGQITLFDGRTGEQFERQVTVGYMYMLKLNHLVDDKMHARSTGSYSLVTQQPLGGKAQFGGQRFGEMEVWALEAYGAAYTLQEMLTVKSDDVNGRTKMYKNIVDGDHRMEPGMPESFNVLLKEIRSLGINIELEEE

SEQ ID NO: 77815 - protein, 165 aa, Yersinia pestis
MALNLQGKQAIVAEVKEVAKGALSAVVADSRGVTVDKMTELRRAGREAGVHMQVVRNTLLRRIVEGTPFECLKDTFVGPTLIAFSAEHPGAAARLFKAFAKDNAKFEVKAAAFEGELIPAAQIDRLATLPTYEEAIARLMGTMKEAAAGKLVRTLAALRDQKEAA

SEQ ID NO: 77816 - protein, 234 aa, Yersinia pestis
MAKLTKRMRVIRDKVDVTKQYDINEAVALLKELATAKFVESVDVAVNLGIDARKSDQNVRGATVLPHGTGRSVRVAVFAQGANAEAAKEAGAELVGMDDLADQIKKGEMNFDVVIASPDAMRVVGQLGQILGPRGLMPNPKVGTVTPNVAEAVKNAKAGQVRYRNDKNGIIHTTIGKVDFDSDKLKENLESLVVALKKAKPATAKGIYIKKISLSTTMGAGVAIDQSGLTAVVN

SEQ ID NO: 77817 - protein, 717 aa, Yersinia pestis
MSRTIMLIPTGTSVGLTSVSLGVIRSMEQKGVSLSVFKPIAQPRAGNDAPDQTTTIIRANSSITAAEPLNMNYVETLLSSNQQDVLMEEIVARYHENTKDAEVVLVEGLVPTRKHQFANALNYEIAKTLNAEIVFVIALGNDSPDQLKERIELARSSFGGSKNKNITGVIINKLNAPVDEQGRTRPDLSEIFDDSTKASVANIDPSQLFANSPIPVLGCVPWSFELIATRAIDMAKHLNARIINEGDIKTRRVKSVTFCARSIPHMLEHFRPGSLLVTSADRPDVLVSACLAAMNGVEIGAILLTGGYAIDDRINNLCERAFQTGLPVFMVDTNTWQTSLSLQSFNLEVPADDHERVEKLQNYVASHISSEWIDSLTAASERPRRLSPPAFRYELTELARKAGKRIVLPEGDEPRTIKAASICAERGIATCVLLGNPEEIQRVATSQGVELGKGVEIIDPVAVREQYVPRLVELRKSKGMTEVVAREQLEDNVVLGTLMLEKGEVDGLVSGAVHTTANTIRPPLQLIKTAPGSSLVSSVFFMLLPDQVLVYGDCAINPDPTAEQLSEIAIQSADSAAAFGIEPRVAMISYSTGNSGAGSDVEKVREATRLAQEKRPDLIIDGPLQYDAAIMADVAKSKAPNSPVAGRATVFIFPDLNTGNTTYKAVQRSADLISIGPMLQGMRKPVNDLSRGALVDDIVYTVALTAIQSAQADSAAS

SEQ ID NO: 77818 - protein, 142 aa, Yersinia pestis
MAKKVQAYVKLQVAAGMANPSPPVGPALGQQGVNIMEFCKAFNAKTESIEKGLPIPVVITVYSDRSFTFVTKTPPAAVLLKKAAGIKSGSGVPNKDKVGKVTSAQVREIAETKAADMTGSDVDAMMRSIEGTAHSMGLVVEG

SEQ ID NO: 77819 - protein, 370 aa, Yersinia pestis
MVYRYSMRYLAVILPLLTLLSACSSQPTPPVAATPSDSPVQGGFLLEPEHTGQLQNGDFAFNPDTTRFVDKMVREHGFDRQQLHDVLAQTQRLDWVIRLMDKQAPTSRPPSEPNGAWNRYRNKFITPDNVQNGVVFWNQYEGALQRAWEVYGVPPEIIVGIIGVETRWGRVMGKTRIIDALATLSFAYPRRATFFTGELETFLLMARAEGKDPLSLRGSYAGAMGYGQFMPSSFKRYAVDFDGNGHINLWDPVDAIGSVANYFKSHGWTKGAPVAVPANGQAPNLENGFKTRYPISTLAAAGLSPKGSLGDYQEASLLRFDVGTGYQYWYGLPNFYTITRYNHSTYYAMAVWQLGEAVGRARKGESMITQ

SEQ ID NO: 77820 - protein, 181 aa, Yersinia pestis
MSEAPKKRWYVVQAFSGFEGRVAQSLREHIKLHDMEELFGEVMVPTEEVVEIRGGQRRKSERKFFPGYVLVQMVMNDASWHLVRSVPRVMGFIGGTSDRPAPISDKEVDAIMNRLQQVGDKPRPKTLFEPGELVRVSDGPFADFNGVVEEVDYEKSRLKVSVSIFGRATPVELDFSQVEKG

SEQ ID NO: 77821 - protein, 147 aa, Yersinia pestis
MLKTLLTSDVIQVVSQAKDWRDAIAISCQPLIDNGAVEARYVEAIYRSHEAIGPYYVVGPGIAMPHARPEDGVNRLSLALTVITEGVTFNAEGNDPVKLLIVLAATDSNSHIEAISQLAQLFDTASDVQALLNAKTPQDILSVIARY

SEQ ID NO: 77822 - protein, 394 aa, Yersinia pestis
MSKEKFERTKPHVNVGTIGHVDHGKTTLTAAITTVLAKTYGGSARAFDQIDNAPEEKARGITINTSHVEYDTPARHYAHVDCPGHADYVKNMITGAAQMDGAILVVAATDGPMPQTREHILLGRQVGVPYIIVFLNKCDMVDDEELLELVEMEVRELLSQYDFPGDDTPVIRGSALKALEGDAEWEAKIIELAEALDSYIPQPERAIDRPFLLPIEDVFSISGRGTVVTGRVERGIVKVGEEVEIVGIIDTIKTTCTGVEMFRKLLDEGRAGENVGVLLRGTKRDDVQRGQVLAKPGSIKPHTKFESEVYILSKDEGGRHTPFFKGYRPQFYFRTTDVTGTIELPEGVEMVMPGDNVNMVVNLIAPIAMDDGLRFAIREGGRTVGAGVVAKVIE

SEQ ID NO: 77823 - protein, 259 aa, Yersinia pestis
MRRTLLTILSFLRTVRLLTTLTLLILSVVATVARAEVMISGTRVIYEEKQREGVVKVSNTGDMPVLLQAWIDKGDANARPEAIKVPFSVTPPVVRLDPKRDQTIRLFRTDGGLAADRETLFWFNLLEVPPKPIQSAAGGENKMQLAFRTRIKMFYRPEGLTVLPAQAAKSLAFSMKGNQIVIKNASPYYITLRKLELRTSEKGPVLANFTKINNKMVAPFSELSLPTSAKASINNSAQVFYSVINDQGGETQGTQKLTQ

SEQ ID NO: 77824 - protein, 870 aa, Yersinia pestis
MLSAFIFFQKNECLKYLPAFSFAICGIGGMLYIPSSAAENSEYVEFSDAFLRFPVDATRYSEGNPVSPGERQVDIYLNDQWIGRQEMRFALPSPESKVATPCFDVKLFDELGVDTAKLSSDTVKLLESRGACSPLSRLLEGGNAIFDDNQQRLDIQVPQAYLIRQARGYVHPKYWDDGVTAATLKYDYTGYRSNQNDIGSQTYQYLGLLGGLNWQSWRLYYRSALNRSDSQGFDYQNLATYVERAVPSLYSKMTIGDSNTDGQVFDSLSYRGIELTSDDRMYADSQRGYAPVVRGVARTNARVVVRQQGRPIYETTVPPGPFVIDDLYPTGQGGNLNVTITEADGSEQTFIVPFASIAELLRPGTTRYSLMAGEYRDNSMVDKPVLFMGTVRHGLSNLLTGNGGMVAAEGYLSASAGLAFNTPVGAVAFNVTQAQTRLPNKDNQRGQSIGMTYAKSLPETNTNLTIASYHYSSNGFYTPAEAMRMRDYLQHGEVNNTQIDSSWPNGSDRYDDSFKYRRRNQAQVSIAQGLPDGYGSFYANANVQDYWDGRNRDMNFQFGYTNSYKSLSYNVALNRLRDIPSGDWDNQLSVSLSIPLGTHAGAPRLSSSYSNTRGSSAIQTGVSGSAGEDNQFSYGVSAANNRSDENGSYNTLGANGSWQAPYATVGGSYSKSNSYDQASASLSGGVVAYRGGVILAPALGDTVGIIEAPDAAGARVGSYSSMYLDRRGRAILPYLSPYRQNEVELDPKGLSADVEFKSTSQKVAPTAGAVALVTFETSTGYSVLVRGHLADNTPLPFGAEVKDGGGTRVGFIAQGGQAMVRVNQQAGNLRVIWGDGIGESCSFDYKLPEGNLVKGHLVKGDYRRLEVICK

SEQ ID NO: 77825 - protein, 345 aa, Yersinia pestis
MSNQRSSLKHLNTFALPAYASNVISAGSVETLIAAWHESKAKRQPVLLLGEGSNVLFIKNFSGTVLLNRIMGITSTEDSAAWYLHVGAGENWHQLVCHSLQNNMPGLENLALIPGCVGSAPIQNIGAYGVELKQVCEYVDLLDMDKGTIQRISAEECQFGYRDSIFKHRYGNGFAIVSVGIKLMKSWTPTLGYGDLIHMDPLTVTATDIFNSVCTMRRSKLPDPMVTGNAGSFFKNPVVSAAIAEEIVHCYPNAPHYLQPDGSVKLAAGWLIDQCSLKGYQIGGAAVHQQQALVLINQSEATGQDVIHLARYIRQQVAQRFSIWLEPEVRFIADNGEVNAVEHLS

SEQ ID NO: 77826 - protein, 455 aa, Yersinia pestis
MNPSTSDGLPVPQRYAAILVIALGIMMAVLDGTIANVALPTIARDLNTSPATSIWVVNAYQLAITISLLSMASLGDIIGYRRVYQAGLLIFSVTSLFCALSDSLWTLTFARVLQGFGAAALMSVNTALIRIIYPRAQLGRGIGINTLIVAVSSAAGPSIAAAVLSVASWQWLFALNVPIGLLAWCLGIKFLPANNTKSNGNRFDITSCVLNALTFGLLITAISGFSQGQSPAVIAAQVVALLLIGFFFVRRQLTQSFPLLPVDLLRIPIFALSIGTSIFSFAAQMLAMVSLPFFLQTVLGRDEVATGLLLTPWPLATMVIAPIAGRLVERYHAGLLGGIGLAVFASGLFLLAVLPANPSDVDIIWRMILCGAGFGLFQTPNNHTIISAAPQHRSGGASGMLGTARLLGQTSGAALVALMFNMFSTNGTHASLILAGCFASIAALVSLLRVTQKSH

SEQ ID NO: 77827 - protein, 306 aa, Yersinia pestis
MRKTEADRHTTAVQLGINPLTWTNDDLPSLGAETSLETCLSEGKEAGFAGFELGNKFSREAGVLGPILEHHQLKLVSGWYSGRLLERSVEEEIVAVRSHLALLRELGAKVMVFAEVSGCIHGEQQTPVHLRPRFPPARWAEYGAKLTAFARYTQALGVQIAYHHHMGTVIESAQDIDNLMIHTGEEVGLLLDTGHLTFAGADPLAVAQRWIARINHVHCKDVRTSVLADVKNRKTSFLDAVLSGVFTVPGDGGVDYPPIMALLKQHGYQGWLVVEAEQDPNVAHPMTYARMGYHNLSRLAHNAGLI

SEQ ID NO: 77828 - protein, 411 aa, Yersinia pestis
MAELPAKRRFTRIDRLPPYVFNITSELKMAARRRGEDIIDFSMGNPDGPTPPHIVEKMCSVAQREDTHGYSTSRGIPCLRRAISRWYADRYQVDIDPENEAIVTIGSKEGLAHLMLATLDHGDTVLVPNPSYPIHIYGAVIAGAQVRSVPLTEGIDFFGELERAIRETIPKPKMMILGFPSNPTAQCVELDFFERVVALAKQYDVLVVHDLAYADIVYDGWKAPSIMQVPGAKDIAVEFFTLSKSYNMAGWRIGFMVGNPELVSALARIKSYHDYGTFTPLQVAAIAALEGDQQCVRDIAEQYRQRRNALVRGLHEAGWMVDNPKASMYVWAKIPEPYAHLGSLEFAKRLLAEAKVCVSPGIGFGDYGDTHVRFALIENQDRIRQAVRGIKSMFRADGLLKPGKSSPNEMA

SEQ ID NO: 77829 - protein, 329 aa, Yersinia pestis
MVYQASSSRYQEMEYHRCGHSGLKLPAISLGLWHNFGDSTRYENSRSLIHRAFDHGITHFDLANNYGPPPGSAELNFGRILQQDLRPYRDELIIASKAGYTMWPGPYGDWGSKKYLVASINQSLQRMGLDYVDIFYHHRPDPNTPLEETMAALDLLVRQGKALYIGLSNYPADQAQLACEILRALGTPCLIHQPKYSMFERGIEAGLQDTLDEYGVGSIAFSPLAGGLLTDRYLAGIPEDSRAASDSKFLSPEQLTPEKLVKIRQLNELALDRGQKLSQMSLAWVLRGGRVTSALIGASKVSQIDDAIGMLANTNFSDKEINAIEHILA

SEQ ID NO: 77830 - protein, 729 aa, Yersinia pestis
MLYQSETLQLHWLENGIAELVFDAPGSVNKLDTKTVANLGEALNVLEKQSELKGLLLRSAKTALIVGADITEFLSLFNAPPEKLHQWLVFANTIFNRLEDLPVPTISAINGYALGGGCECILATDFRIASPEARIGLPETKLGIMPGFGGSVRLPRLLGADSALEIIATGKDVTANDALKIGLVDAVVDPEKLVGSALTMLKQAIDGKLDWQAARRPKLEPLKLNPTEAAMCFTIAKGRVMQVAGKHYPAPLTAVKTIEAAAKFGRTEALNLETNSFVPLAGSNEARALVGIFLNDQYVKAQAKKLSKGVAAPKLAAVLGAGIMGGGIAYQSALKSVPVIMKDINENSLDLGMNEAAKLLNKQLERGKVDGLKMASILATIRPTLDYAGIERAQVIVEAVVENPKVKAAVLAEVEALIGEDTVLASNTSTIPIDQLAKSLKRPENFCGMHFFNPVHRMPLVEIIRGAKTSDKTLAAVVAYATQMGKTPIVVNDCPGFFVNRVLFPYLAGFGMLVRDGGDFHQIDKVMEKQFGWPMGPAYLLDVVGIDTAHHAQAVMAAGFPERMNKDYRDAVDVMFDNQRFGQKNGQGFYRYTQDAKGKPRKENDEQVDKLLAEISQPLQEFSDEDIIARTMIPMINEVVRCLEEGIIASAAEGDMALVYGLGFPPFHGGVFRYLDTLGSANYVEMAQRYAHLGALYHVPAGLRAKAEHNESYYPVAAALLDVSTNQPA

SEQ ID NO: 77831 - protein, 387 aa, Yersinia pestis
MENVVIIDAVRTPMGRSKGGAFRHVRAEDLSAHLMRAVISRNPGLNAAEIDDIYWGCVQQTLEQGFNIARNASLLAEIPHSVPAVTVNRLCGSSMQALHDGARAIMVGDAKISLIGGVEHMGHVPMNHGVDFHPGMGRTVAKAAGMMGLTAEMLAKIHNISRQSQDEFAFRSHQRAYAATQAGHFAKEIVATNGHDAEGVLKRFDFDEVIRPETNLSGLAALRPAFDPVNGTVTAGTSSALSDGASAMLIMSESRAKSLGLTPRARIRSMAVVGCDPSIMGYGPVPASQLALKRAGLELADIGLFELNEAFAAQSLACLKGLGLLESMDDKVNLNGGAIALGHPLGCSGARISTTLLNLMERRDVQFGLATMCIGLGQGIATVFERL

SEQ ID NO: 77832 - protein, 409 aa, Yersinia pestis
MLNGRAVDTSRRPLRKIKLSLMGPAFIAAIAYIDPGNFATNIQAGATFGYTLLWVVVWANVMAMLVQLLSAKLGIATGKNLAEHIRDRFPRPVVWAYWVQAEIIVMATDLAEFIGAAIGFKLLFGVTLLQGAVLTGIATFLILMLQNRGQKPLELVIGGLLLFVAAAYIVELIFSQPDIAALGRGMLIPNLPDGNAVFLAAGVLGATIMPHVIYLHSALTQTGGEESKTERYASTKFDVAIAMTIAGFVNLAMMATAAAAFHFNGYENIAEIEEAYITLQPLLGNAAATVFGLSLIAAGLSSTVVGTLAGQVVMQGFVRFYIPMWVRRIVTMLPSFIVILAGMDATQILVMSQVLLSFGIALALVPLLVFTGNKELMGELVDTKTTQILGKLVVLIVVGLNAYLLISLL

SEQ ID NO: 77833 - protein, 233 aa, Yersinia pestis
MTTLSCKVTSVEAITDTVYRVQLVPESSFSFRAGQYLMVVMDERDKRPFSMASTPFQQDFIELHIGASELNLYAMAVMDRILKEKKLDVDIPHGDAWFREGSKRPLVLIAGGTGFSYARSILLAALAEQPDREVSIYWGGREAVHLYDLGELEALSIKYPQLKVIPVVEQPEEGWRGRTGTVLSAVLQDYGSLAEQDIYIAGRFEMAKIARERFCVERGAQEEHIFGDAFAFI

SEQ ID NO: 77834 - protein, 471 aa, Yersinia pestis
MKIKTRFAPSPTGYLHVGGARTALYSWLFSRHLGGEFVLRIEDTDLGRSTQEAIDAIMDGMNWLNLDWDEGPYFQTKRFDRYNAVIDQMLDAGTAYRCYCSKERLEALREAQMANGEKPRYDGHCRDSQCTHGADEPSVVRFRNPQEGSVIFDDKIRGPIEFSNQELDDLIIRRTDGSPTYNFCVVIDDWDMEITHVIRGEDHINNTPRQINILKALGAPVPEYAHVSMILGDDGKKLSKRHGAVGVMQYRDDGYLPEALLNYLVRLGWSHGDQEIFSIEEMTQLFTLDAVSKSASAFNTEKLQWLNHHYINSLPPEQVAVHLSWHVEQLGIDTRNGPELVEIVKLLGERCKTLKEMAESCRYFYEEFDAFDVDAAKKHLRPIARQPLEAVKVKLAAITEWTTENVHNAIQGTADELGVGMGKVGMPLRVAVTGVGQSPGMDVTVHAIGQARTLARIDKALAFISEREAQQ

SEQ ID NO: 77835 - protein, 340 aa, Yersinia pestis
MSYAFPGTFPGRRMRRVRCHDFSRRLVAENHLTVNDLIYPVFVMEGTHQQQAVSSMPGVSRMTIDLLLKEAEAIAKLGVPVISLFPVIEAGKKSLYAEEAYNPDGLVQRTVRALKDAVPELGILTDVALDPYTTHGQDGVIDSDGYVINDVTKEILVRQALSHAEAGAEIIAPSDMMDGRIGAIRDQLERQGLVNTQIMAYSAKYASCYYGPFRDAIGSSSNLKGGDKKTYQMDPANSDEALQEIAQDLQEGADMVMVKPGMPYLDVVRRVKDTFGVPTFAYQVSGEYAMHMAAIQNGWLQEKPTVMESLLCFKRAGADGVLTYFAKQVAQWLHDDQMQR

SEQ ID NO: 77836 - protein, 670 aa, Yersinia pestis
MESIIQQINQLRTSLRHHEHQYHVLDAPEIPDAEYDRMMQQLRDLEAQHPELVTNDSPTQRVGAAPLDAFEQVKHEVPMLSLDNVFDEESYLAFDKRVHDRLKTAEPLTFCCELKLDGLAVSLLYENGELVRAATRGDGTTGENITANVRTIRAIPLRLHGDNVPRRVEVRGEVFMPQAGFEQLNEEARRKGGKVFANPRNAAAGSLRQLDPRITAKRPLTFFCYGVGLLDGGELPRSHIQCLMQFKAWGLPVSERVKLCTGSDQVIAFYRQIEQDRAGLGFDIDGVVIKVDDLALQEQLGFVARAPRWATAFKFPAQEQITQVREVEFQVGRTGAITPVARLEPVQVAGVIVSNATLHNADEIERLGLRIGDTVIVRRAGDVIPQVVGVVMEQRPDDTKEITFPSQCPVCGSDIERVEGEAVARCTGGLFCAAQRKEALKHFVSRRALDVDGMGDKIIEQLVEKQYVENPADLFQLTAGKLTGLDRMGPKSAQNLIAALEKAKQTTFARFLYALGIREVGEATAANLAAHFRTLDNLRAADIETLKSVPDVGEVVAKHVMNFLSEEHNQKVIEELEKVVSWPEPQQIVVEESDSPFAGKTVVLTGSLTILSRDEAKDRLTALGAKVSGSVSKKTHLVIAGEAAGSKLAKAQELGIKVIDEAEMIRLLGE

SEQ ID NO: 77837 - protein, 328 aa, Yersinia pestis
MMQDLRLILIVVGAIAIIALLLHGLWTSRKERSSLFRDRPVKRTKQERVETPIESLDEGVGEVRVRTSHPQEKPSFNHLDDDDDEVPVIQHAETKSAQVKTASRQAPFASVQTDYDDPLLGGLSAEQPPHDLSRDPLLGKADESYSQPQHAEPPHVEKPAHQVAPQQHVESQQEPVAPAPEAKPQKLKETVLVLHVAAHHGGVIGGEVLLQSVLQSGFQFGEMGIFHRHLSPAGSGPVLFSLANMVKPGSFDPDTMSDFSTPGVSMFMMVPSYGDANQNFKLMLQSAQRIADDVGGVVLDDERRMMTPQKLESYKARIREVLDANTIA

SEQ ID NO: 77838 - protein, 270 aa, Yersinia pestis
MIKWLWKANKPQAEMLAQWHEALNIPLLAPLNEPEQQRLVSVASQLLQQKRFIPLQGLILTPLMQARLALLFALPVMELGAKWLDGFHEVLIYPSPFIVAEDWQDDLGLVHSGQSVQSGQSWEQGPIVLNWQDIQDSFDLSGFNLVIHEAAHKLDMRNGGHSNGVPPIAMRDVAVWEHDLHHAMDNIQDEIDMVGVEGASMDAYAASNPAECFAVLSEYFFSAPELLEGRFPAVYQHFCRFYRQDPLARLKRWENSLADNPPPENTHSHR

SEQ ID NO: 77839 - protein, 322 aa, Yersinia pestis
MSKIYEDNSLTIGHTPLVRLNRIGNGRILAKVESRNPSFSVKCRIGANMIWDAEKRGILTAGKELVEPTSGNTGVALAFVAAARGYKLTLTMPETMSIERRKLLKALGANLVLTEGAKGMKGAIAKAEEIQATDPERYLILQQFSNPANPEIHEKTTGPEIWEDTDGDVDVFVSGVGTGGTLTGVSRYIKNTQGKAITTVAVEPTDSPVITQALAGQEIKPGPHKIQGIGAGFIPGNLDLSLVDRVALVTNEEAISMARRLMDEEGILAGISSGAAVAAAVKLSEEEGFTDKTIVVILPSSGERYLSTALFADLFTEQELQQ

SEQ ID NO: 77840 - protein, 575 aa, Yersinia pestis
MISGILVSPGIAFGKALLLKEDEIVINRKKISADQVEQEVERFKAGRAKAAEQLEAIKTKAGVSLGEEKAAIFEGHIMLLEDEELEQEIIALIKDEHASADAAAYSVIEGQAKALEELDDEYLKERAADVRDIGKRLLKNILGLNIVDLSAIQDEVILVATDLTPSETAQLNLDKVLGFITDIGGRTSHTSIMARSLELPAIVGTSNVTKQVKNDDYLILDAVNNKVYLNPTADVIEQLKAVKNQYITEKNELAKLKDLPAITLDGHQVEVVANIGTVRDIAGAERNGAEGVGLYRTEFLFMDRDSLPTEEEQFQAYKAVAEAMGSQAVIVRTMDIGGDKDLPYMNLPKEENPFLGWRAIRIAMDRKEILHAQLRAILRASAFGKLRIMFPMIISVEEVRELKAELELLKSQLREENKAFDETIEVGVMVETPAAAVIARHLAKEVDFFSIGTNDLTQYTLAVDRGNELISHLYNPMSPSVLGLIKQVIDASHAEGKWTGMCGELAGDERATLLLLGMGLDEFSMSAISIPRIKKIIRNTNFEDVKVLAEQALAQPTAKELMDLVTTFIEEKTLC

SEQ ID NO: 77841 - protein, 251 aa, Yersinia pestis
MVDQEKETTHFGFRTVAKEQKEGMVAEVFHSVAAKYDLMNDLMSFGVHRIWKRFTVDCSGVRRGQRVLDLAGGTGDLTAKFSRLVGEQGEVILADINESMLRMGREKLRDKGIVGNVSYVQANAEALPFPDNFFDCITISFGLRNVTEKEKALRSMFRVLKPGGRLLVLEFSKPLLEPLSKAYDAYSFHILPKIGELVAQDAESYRYLAESIRMHPDQETLKGMMADAGFENVTYSNLTGGIVALHRGFKF

SEQ ID NO: 77842 - protein, 324 aa, Yersinia pestis
MSIAIIIGTHGAAAEQLLKTAEMILGEQSNVAYIDFVPGENAETLIEKYNDRLTGLDTSKGVLFLVDTWGGSPFNAASRIAIDKENYEVVTGVNIPMLAETFMARDDEPSFAELVAVAVETGREGVKALKAPDVKSDKPETQPAAPVPTAKAPAVALGPNDHMKIGLARIDDRLIHGQVATRWTKETNVNRIIVVSDEVAADKMRKTLLTQVAPPGVTAHVVDVEKAIRVYNNPKYANDRVMLLFTNPTDVVRLVEGGVDIKSVNIGGMAFRQGKTQVNNAVSIDEKDIEAFNKLNARGIELEVRKVSSDSRLKMMDLISKLNK

SEQ ID NO: 77843 - protein, 511 aa, Yersinia pestis
MTTSTSKQTTQDKRLTDGPDWTFELLQVYLDQIDRVAKHYRLDTYPHQIEVITSEQMMDAYSSIGMPINYTHWSFGKKFIETEQKYKYGQQGLAYEIVINSNPCIAYLMEENTITMQALVMAHACYGHNSFFKNNYLFRAWTDASSIVDYLLFARHYINECEERYGVEEVERLLDSCHALMNYGVDRYKRPQKISLVEETARQKSREEYLQSQVNSLWKTLPRKDREEAPVQAQRYPNEPQENILYFMEKNAPLLESWQREILRIVRKVSQYFYPQKQTQVMNEGWATFWHYTILNHLYDEGRVTDRFMMEFLHSHTNVVYQPPYNSPYYNGINPYALGFAMFQDIKQICQSPTEEDYYWFPDIAGKDWLDTLHFAMRDFKDESFISQFLSPKIMRDFRLFTVLDDDKNNYLEISAIHNEEGYRTIRNQLSAQYNLSNHEPNIQVWNVDLRGDRSLTLRYIPHDRAPLDKSRQQVMKHIHRLWGFDVHMEQLNDDGSIDLLDSIPQKTSKI

SEQ ID NO: 77844 - protein, 249 aa, Yersinia pestis
MNRDWPYPPIVAHRGGGSLAPENTLAAIDVGARYGHKMIEFDAKLSQDGQIFLLHDDTLERTSNGWGVAGELTWEKLIQLDAGDWFSKAFRGERLPLLSEVAARCAQHGMAANIEIKPTTGTDAPTGRAIALAARALWQGQPIPPLLSSFSVDALAAAQLAVPELPRGLLLDKWDDNWAALTTQLDCVSLHINHKQLTAERVALLKAAGLRILVYTVNQPERARELLNWGVDCICTDRIDLLGSDFTGC

SEQ ID NO: 77845 - protein, 439 aa, Yersinia pestis
MFNNSIHKVSICIALTLTFSANAMAVTEIPFWHSMEGELGKEVDSIADRFNQSQPDYKIVPVYKGNYEQSLAAGIAAFRSGKAPAILQVYEVGTATMMASKAIKPVYQVFKDANIDFDESVFVPTVAGYYTDSKTGRLLSQPFNSSTPVLYYNKEAFKKAGLDPEQPPKTWQELAADTAKLRAAGSSCGYASGWQGWIQIENFSAWHGQPIASRNNGFDGTDAVLEFNKPLQVKHIQLLSDMNKKGDFTYFGRKDESTSKFYNGDCAITTASSGSLASIRHYAKFNFGVGMMPYDADAKNAPQNAIIGGASLWVMDGKDKETYKGVAEFLQYLVKPEIAAEWHQKTGYLPITTAAYELTKQQGFYEQNPGADVATRQMLNKPPLPYTKGLRLGNMPQIRTVVDEELEAVWTAKKTPQAALDNSVKRGDVLLRRFEQANK

SEQ ID NO: 77846 - protein, 424 aa, Yersinia pestis
MGYFIDRRLNGKNKSMVNRQRFLRRYKSQIKQSIADAINKRSVTDIESGESVSIPIDDINEPMFHQGNGGLRHRVHPGNDHFITNDRVDRPQGGGGGGSGQGNAGKDGEGEDEFVFQISKDEYLDLLFEDLALPNLKRNQYKQLAEFKTHRAGYTSNGVPANISVVRSLQNSLARRTAMTASKRRELRELEAALTVLENSEPAQLLEEERLRKAITELKQKIARVPFIDTFDLRYKNYERRPEPSSQAVMFCLMDVSGSMDQATKDMAKRFYILLYLFLSRTYKNVDVVYIRHHTQAKEVDEQEFFYSQETGGTIVSSALKLMDEVVQERYNPAQWNIYAAQASDGDNWADDSPLCHELLAKKILPVVRYYSYIEITRRAHQTLWREYEDLEEKFDNFAIQHIREPEDIYPVFRELFHKQTVDN

SEQ ID NO: 77847 - protein, 428 aa, Yersinia pestis
MKQLNFVNAIISSFVLLVLASFVMGLQLQLDGTRLVVQGASEVRWLWIGAGCLVVFCFQLVRPLIQQGIKKVSGPAWVLPSFDGTTPRQKLLAAVVIIAAVAWPFLVSRGSVDIATLTLIYVMLGLGLNVVVGLSGLLVLGYGGFYAIGAYTYALLNHYYGLGFWESLPLAGITAALSGFLLGFPVLRLRGDYLAIVTLGFGEIVRILLLNNTEITGGPNGISQIPKPTLFGLEFSRTAKDGGWDTFHNFFGLTYDPSHRIIFLYLVALLLVILTLFVINRLLRMPLGRAWEALREDEIACRSLGLSPTKIKLTAFTISAAFAGFAGTLFAARQGFVSPESFTFVESAFVLAIVVLGGMGSQFAVILAAVLLVVSRELMRDLNAYSMLLLGALMVLMMIWRPQGLLPMKRPQLKLKVADVKAKQGEQA

SEQ ID NO: 77848 - protein, 292 aa, Yersinia pestis
MKTGAPRFKPGKILDALGAMQNSLTRSAQRIAAYILAQPAQVTQLSIADLSALTQAGEATIIRFCRTLGYKGFQDFKMDLAIEVATRHNSENSLLDADVQEGDDTLAIGSKLQSAINNVLSETLNLLSIESVEQVVKVLRPADRICIFGVGSSGITAEDAKGKLMRIGLRVDAATNNHFMYMQASLMNPGDVAIGISHSGTSAETVQALKLAKEAGATTVALTHNMGSRITELADYVLINGNRQGQLQGDSIGTKIAQLFVLDLIYALLVKADPAQAESIKRKTTQAVSQNG

SEQ ID NO: 77849 - protein, 334 aa, Yersinia pestis
MEYMTIKVGINGFGRIGRIVFRAAQERSDIEIVAINDLLDADYMAYMLKYDSTHGRFDGTVEVKDGHLVVNGKTIRVTAERDPANLKWNEVNVDVVAEATGLFLTDETARKHIAAGAKKVVLTGPSKDDTPMFVMGVNHKAYAGQEIVSNASCTTNCLAPLAKVINDKFGIVEALMTTVHATTATQKTVDGPSHKDWRGGRGASQNIIPSSTGAAKAVGKVIPELNGKLTGMAFRVPTPNVSVVDLTARLEKPASYKEICAAIKAASEGELKGVLGYTEDDVVSTDFNGEKLTSVFDAKAGIALNDNFVKLVSWYDNETGYSNKVLDLISHISK

SEQ ID NO: 77850 - protein, 183 aa, Yersinia pestis
MDALELLLNRRSASRLTAPAPAGEVLDHIIHAGMRAPDHGALQPWRFVLIENEGLVRFSQLLQKAVQQDGADETVLEKAKQAPFRAPLIITVIAHVTENAKVPNWEQVVSAGCAVQAMQMAALAQGFNGIWRTGSWTHHPVVRQGFACREQDEIVGFLYLGTPQLKSATKIMPPDHSAFVRYF

SEQ ID NO: 77851 - protein, 541 aa, Yersinia pestis
MAKEKKRGFFSWLGLGRQSEEPAAEPLATEKEGVTEQEDVIEQTGVIEPTDVIEQTVEHVISEKTTEAPAENAFIEVELREQVAAVIPTEPNNAIMSEGVPDTLPERAVAESVVAELVETGDNAAIVHDEIIEPITQVTEAGGELSLVKPGIEGDTTEQGGPTDNLPKRSLTEDNLIIDVPTPQAVVEESRVDAVEQPTETSEVEEVEEVEEVEEVEEVEEKIIPVAAQEQERPTKEGFFARLKRSLIKTKQNLGSGFMGLFSGKKIDDDLFEELEEQLLIADVGVETTRKIITSLTEHTSRKQLKDADALYGKLKEEMSEILSKVDKPLDVSGKSPYVILMVGVNGVGKTTTIGKLARQFQAEGKSVMLAAGDTFRAAAVEQLQVWGERNKIAVVAQHTGADSASVIFDAIQAAKARGIDVLLADTAGRLQNKAHLMEELKKIVRVMKKLDGDAPHEVMLTLDASTGQNAVSQAKLFNEAVGLTGITLTKLDGTAKGGVIFAIADQFEIPIRYIGVGEGIEDLRPFKADEFIEALFARED

SEQ ID NO: 77852 - protein, 642 aa, Yersinia pestis
MMRLFIAEKPSLARAIADILPKPHRRGDGFIACGNDQMVTWCVGHLLEQAQPDAYDSRYARWSLADLPIIPEKWQLQPRPSVSKQLNVIKQLLQQADEVVHAGDPDREGQLLVDEVLDYLGLAAEKRQNVRRCLINDLNPQAVERAVERLRYNREFIPLCVSALARARADWLYGINMTRAYTILGRNAGYDGVLSVGRVQTPVLGLVVRRDEEIESFIPKDFFEVKAHIVTPADERFIALWQPSDSCESYQDEEGRLLHRPLAEHVVNRITGQPALVTSYNDKRESETAPLPFSLSTLQIEAAKRFGLSAQQVLDICQRLYETHKLITYPRSDCRYLPEEHFAGRHSVLNAISLHQSDLLPLEVMDSDRRNRCWDDKKVDAHHAIIPTARASKVNLTTDEGKVYRLVAQQYLMQFCPDAQFRKCVIELDIAGGKFIAKARFLAEAGWRTLLGSKERDEENEGAPLPVVAKGAELLCERGEVVERQTQPPRPFTDASLLSAMTGIARFVQDKELKKVLRATDGLGTEATRAGIIELLFKRTFLFKKGRYIHASPAGRALIHALPDIAARPDMTAHWESTLTQISEKNCRYQDFMQPLVMTLQDLISQAKQNRSPQVFRGLPVGPSGAPKKRKKISSKAKESKS

SEQ ID NO: 77853 - protein, 759 aa, Yersinia pestis
MNTNSKKTYLNIAISFILYASTAMNANADSCIDYTVTDICEQSKYAAGEFHNIKLGDGVTAGSEDHHFVFNGEGYELYNSNANFSAQIASGTIRYTEVNNSYFTVNAHHFPDDTIYAGRAENTTLNDSLMWVATSADQTLAKGNSMVVVSTQMAMVDQIFVTTLNDGSLPFDPVITNSRYEDTSYEMLWGMKNEAKGWDTKATSHDSVFVDASKQSIEANGHSIGATFYGRATQVVKAGGESQDTHLFDHSYSWVYAEAKLTGLTEVNDAATVYLNAAATQGAYAENVVLNGEDTTLMVRASLDNNAYATVDNLILNGGEVVFQQSSGDQYASLNIGTLSGSGSFLFNTSIAEGKGNFVTIANASGEHKVIVNDSGHEITSPDMTTLDLIHDLSGDATFTLASISGANIIEVDGGTYVYSLNTWDNSARAGGNLWYLGSGLNTGTELEPEPEEKTTPSTDAVLSMASSNQFIFDGEMQNLRFRKGDLNNNKGDGASVWGRYLTNNTRVNAAHDAAYRLQQDGFEIGADKVLEMSSGQLVLGGFTSYSNNRVKHARGGNSTVDSYSLGAYGTYFDNSGYYVDAVVKANRFKNSLNAHMTNGGSVQSDYNQNAIGGSLEAGYHYSLSNNWFVEPYVRTSYYTAQDKDIALNNGMTANIDNNRSAKGEIGTHLGTKIDLNNGAIIRPYAKVAIEREFIKSNTVTINQVNDFNNDLSGHTAKYGLGMDINLMKQTSVYAEANYRNGTHVESPIMANIGFRINF

SEQ ID NO: 77854 - protein, 154 aa, Yersinia pestis
MSELCPCGSILNYHECCGPYILGTQVAAKPAILMRSRYCAYVEKNVDYLIATWHPDCHAQEWRESIIQGFTKTVWHGLTVIAETPGRHPDEAFVEFIARFTDADNAQITAMHERSRFLRIKEHWYYIDGIRPSLGRNDTCLCGSGKKHKKCCGR

SEQ ID NO: 77855 - protein, 448 aa, Yersinia pestis
MKVTVFGIGYVGLVQATVLAEVGHDVLCIDIDANKVADLKKGRIAIFEPGLAPLVKENYEAGRLQFSTDAQAGVAHGVIQFIAVGTPPDEDGAADLKYVLDVASTIGTYMDSPKVIIDKSTVPVGTADKVHQVIQAILEQRGEKIDFSVVSNPEFLKEGAAVADCKRPERIVIGIDTDDSGALELISELYEPFNRNHDRMLVMDIRSAELTKYAANGMLATKISFMNEIANIAERLGADIEKVRQGIGSDSRIGYHFIYSGCGYGGSCFPKDIQALIRTAEDKGYKPQLLQAVEQINNQQKYKLTEFIKSHFNSQLAGKTFAVWGLAFKPNTDDMREAPSRVVMESLWEAGATIQAYDPEAMDETQRIYGARDDLRLMGTKESALQGADALIICTEWQSFRAPDFDMIKSRLKHPVIFDGRNLYDPERLNSRGFTYYGIGRGVSINLS

SEQ ID NO: 77856 - protein, 196 aa, Yersinia pestis
MAQLYFYYSAMNAGKSTALLQSSYNYQERGMRTLVFTAEIDNRFGVGTVSSRIGLSSQAQLYNSGTSLLSIIAAEHQDTPIHCILLDECQFLTKEQVQELCQVVDELHLPVLCYGLRTDFLGELFPGSKYLLAWADKLVELKTICHCGRKANMVLRLDEQGRAVHNGEQVVIGGNESYVSVCRRHYKEAIKAACCS

SEQ ID NO: 77857 - protein, 819 aa, Yersinia pestis
MRVLKFGGTSVANAERFMRVADIIESNARQGQVATVLSAPAKITNHLVAMIDKMVAGQDISPNISDAERIFAELLRGLADTQPGFDYDRLKALVGHEFAQLKHLLHGISLLGQCPDSINASIICRGEKLSIAIMEALFQAKGYHVTVINPVEKLLAQGHYLESTVDITESTRRIGASGIPSDHIILMAGFTAGNDKGELVVLGRNGSDYSAAVLAACLRADCCEIWTDVDGVYTCDPRTVPDARLLKSMSYQEAMELSYFGAKVLHPRTIAPIARFQIPCLIKNTSNPQAPGTLIGGESIDEDSPVKGITNLNNMAMINVSGPGMKGMVGMAARVFAVMSRSGISVVLITQSSSEYSISFCVPQGELLRARRALEDEFYLELKDGVLDPLDVMEHLAIISVVGDGMRTLRGISARFFSALARANINIIAIAQGSSERSISVVVNNDAVTTGVRVCHQMLFNTDQVIEVFVIGVGGVGGALIEQIYRQQPWLKQRHIDLRVCGIANSKAMLTNVHGIALDNWRQELAEVQEPFNLSRLIRLVKEYHLLNPVIVDCTSSQAVADQYADFLTDGFHVVTPNKKANTSSMNYYRQMRAAATKSCRKFLYDTNVGAGLPVIENLQNLLNAGDELMRFTGILSGSLSFIFGKLDEGMSLSEATRQAKALGYTEPDPRDDLSGMDVARKLLILAREAGYKLELADIEVESVLPASFDASGDVDTFLARLPSLDAEFTRLVANAAEQGKVLRYVGVIEDGRCKVRMEAVDGNDPLYKVKNGENALAFYTRYYQPIPLVLRGYGAGNDVTAAGVFADLLRTLSWKLGV

SEQ ID NO: 77858 - protein, 309 aa, Yersinia pestis
MVKIYAPASIGNVSVGFDVLGAAVSPIDGTLLGDCVSVTAAERFSLHNEGRFVSKLPDDPKQNIVYQCWERFCQEMGKEIPVAMVLEKNMPIGSGLGSSACSVVAGLMAMNEFCGQPLDKVTLLGMMGELEGRVSGSIHFDNVAPCYLGGMQLILEQEGYISQDVPGFSDWLWVMAYPGIKVSTAEARAILPAQYRRQDCITHGRNLAGFIHACHTQQPDLAAKMMKDVIAEPYRTQLLPGFAAARQAAQDIGALACGISGSGPTLFAVCNDQATAQRMAGWLQNHYLQNDEGFVHICRLDTAGARLLG

SEQ ID NO: 77859 - protein, 429 aa, Yersinia pestis
MKLYNLKDHNEQVSFAQAIKQGLGKQQGLFFPLELPEFELTEIDKLLDLDFVTRSSRILSAFIGSEIAPDVLTKRVQAAFEFPAPVAQVENDIAVLELFHGPTLAFKDFGARFMAQMLAEVAGDQPVTILTATSGDTGAAVAHAFYGLKNVRVVILYPRGKISPLQEKLFCTLGGNIHTVAIDGDFDACQALVKQAFDDEELKTALSLNSANSINISRLLAQICYYFEAVAQLPQEARNQLVISVPSGNFGDLTAGLLAKSLGLPVKRFIAATNANDTVPRFLVNGQWQPKPTVATLSNAMDVSQPNNWPRVEELYRRKIWQLKDLGHGAVSDKTTKDTMRELAGLGYISEPHAAIAYRVLRDQLQDGEFGLFIGTAHPAKFKESVEAILGQELPLPKPLAVRAQLPLLSHDLPADFAQMRAFLMALPK

SEQ ID NO: 77860 - protein, 317 aa, Yersinia pestis
MTDKLTSLRQITTVVADTGDIAAMKLYQPQDATTNPSIILNAAQIPEYRKLIDEAIAWAREQSSDHAQQIVDATDKLAVNIGLEILKLIPGRISTEVDARLSYDTVASVAKAKRLIKLYNEAGISNDRILIKLASTWQGIRAAEQLEKEGINCNLTLLFSFAQARACAEAGVFLISPFVGRILDWYKANGDQKEFAPSEDPGVVSVTEIYQYYKKHGYKTVVMGASFRNLGEIIELAGCDRLTIAPSLLKELAESEGPVERKLAYTGEIQAKPAPLTEAEFYWQHNQDPMAVDKLADGIRKFAIDQGKLEKMISDLL

SEQ ID NO: 77861 - protein, 195 aa, Yersinia pestis
MNILRIGLVSVSDRASSGIYQDKGIPALEEWLTSALTTPFEVETRLIPDEQSLIEQTLCELVDEMGCHLVLTTGGTGPARRDVTPDATLAIADRQMPGFGEQMRQISLHYVPTAILSRQVGVIRKQALIINLPGQPKSIKETLEGVKDAQSNVVVAGIFASVPYCIQLLDGPYIETNTDVVVAFRPKSAIIDIKD

SEQ ID NO: 77862 - protein, 828 aa, Yersinia pestis
MSERKNDVAIAALPVSEVLDELLSALQSSSQVLLHAPTGAGKSTWLPLQILQQSQFLNSGSPGRIIMLEPRRLAAKNVAYRLAQQLGELPGQTVGYRMRAESKIGPDTRLEVVTEGILTRMLQQDAELQGVSLVILDEFHERSLQADLALALLLDVQQGLRDDLKLLIMSATLDNQRLSALLPSAPAIVSAGRSFPVERSYQPLSSHERLEEGVASRVKRLLNEQPGSLLLFLPGVSEIHRVMERLHGEVASDTDLCPLYGALPLSEQQKAIQPAAIGRRKVVLATNIAETSLTIEGIRLVVDSGLERVARFDIKNGLTRLVTQRISQASMVQRAGRAGRLEPGICWHLFAKEQAERAAEYSEPEILNSDLCGLWLELLSWGCQDAAQLCWLDHPPAAALAVARDLLGRLDAIDDQGQLTATGRTMATLGCEPRLAAMLCFGAGHSPDALATAALLAAILEEPPRSGQIDLHDWLSRPQPHWQRRARQLTQRLNARGGSVDHALAAQLLALAYPDRIAQQRGQDGRYLLANGMGAAMAQDEALSRSPWLVAVGLLQNHSGPDARILLALPVDIEQLVTCLPRQVEERTVVEWDDEKGTLRAWRRWQIGRLILRAQPLAKPDDAALQQALLNWVREQGLQILNWDEPAEQLRTRLQCAARWLPEAPWPAVDDDSLQDKLALWLQPSLSGVRDLRGLRQVNIAEALTRLLDWKQRQRLDTELPTHYTVPTGSRLPIRYYVDRPPVLAVRLQEVFGEQQSPMLASGRVAVVLELLSPAHRPLQITGDLAAFWQGAYREVQKEMKGRYPKHVWPDDPAHTRPTRRTKKYQDK

SEQ ID NO: 77863 - protein, 151 aa, Yersinia pestis
MQEGQKRKTSSLSILAIAGVEPYQEKPGEEYMNAAQLSHFKLILEAWRNQLRDEVDRTVSHMQDEAANFPDPVDRAAQEEEFSLELRNRDRERKLIKKIEKTLKKVEDDDFGFCESCGVEIGIRRLEARPTADLCIDCKTLAEIREKQMAG

SEQ ID NO: 77864 - protein, 321 aa, Yersinia pestis
MVQQAVIQRSANQRATNQPTEYIGRFAPSPSGDLHFGSLIAALGSYLQARAQGGKWLVRIEDIDPPREVPGAASRILAALEHYGLHWDGPVIYQSQRHEAYRATLNWLEQQGLSYYCTCTRSRIHQLGGFYDGYCRDRHLPASGAAIRLRQTQPVYAFYDKLLGELHAHPALAQEDFIIRRRDGLFAYNLAVVVDDAFQGVTEIVRGADLIEPTVRQIALYQQLQHPVPGYIHLPLALNNQGNKLSKQNHAPPLPNGDPRPILIDALKFLRQPLPEYWQDLDLYLLLRYAVKHWTLVSIPLQGAITPQKTQRHSQSKYGEL

SEQ ID NO: 77865 - protein, 440 aa, Yersinia pestis
MAIIPRDQHNISRRDISDNALKVLYRLNKSGYEAYLVGGGVRDLLLGRKPKDFDITTSATPEQVRKLFRNCRLVGRRFRLAHVMFGPEIIEVATFRGHHEQQQAEDSDKNSSQQAQNGMLLRDNIFGSIEDDAQRRDFTINSLYYGISDFALRDYTGGLRDLKEGIIRLIGDPETRYREDPVRMLRAVRFAAKLDMSISPETAEPIPRLASLLREIPPARLFEESLKLLQSGYGYKTYLKLCEYQLFQPLFPLIARNFTEQHDSPMERILVQVLKNTDHRLHNDQRVNPAFLFAAMLWYPLIEHAQKLTQESGLAYYDAFALAMNDVLDEECRSLAIPKRITSLVRDIWLLQLRLSRRQGKRAHKLMEHPKFRAAYDLLLLRAEVEKNHELQRLAQWWGEFQEATPTQQKSMLNTLGADPAPRRSRPRRPRKPVPRKEGV

SEQ ID NO: 77866 - protein, 159 aa, Yersinia pestis
MIRVYIALGSNLAMPLQQVSAAREALAHLPRSRLVACSPLYRTKPLGPQDQPDFLNAVVALDTSLPPEQLLDHTQAIERNQGRVRKEQRWGPRTLDLDIMLYGDQVIKTDRLTIPHYGLKAREFMLYPLADIAPDLIFPDGESLSECLKRVDKNGLVLW

SEQ ID NO: 77867 - protein, 266 aa, Yersinia pestis
MMKTTTMSQLRQWKQEKRKFATLTAYDASFAQLFAEQGIQVLLVGDSLGMTLQGFDSTLPVTVADMAYHTRAVRRGAPHCLLLADMPFMSYATPELAFTHAAELMRAGANMVKLEGGSWLCDTIRMLAERAVPVCGHLGLTPQSVNIFGGYKVQGREEVAANQLLQDAIALEQAGAQLLVLECVPVELAQRVTEELTIPVIGIGAGNVTDGQILVMHDALGITGGHTPKFSKNFLAHSAGDIRAAIKLYIEEVEGGIYPAEEHTFQ

SEQ ID NO: 77868 - protein, 891 aa, Yersinia pestis
MAVTNVAELNELVARVKKAQREYANFSQEQVDKIFRAAALAAADARIPLAKLAVTESGMGIVEDKVIKNHFASEYIYNAYKDEKTCGILCEDKTFGTITIAEPIGLICGIVPTTNPTSTAIFKALISLKTRNGIIFSPHPRAKDATNKAADIVLQAAIAAGAPADIIGWIDAPTVELSNQLMHHPDINLILATGGPGMVKAAYSSGKPAIGVGAGNTPVVVDETADIKRVVASILMSKTFDNGVICASEQSIIVVDSVYDAVRERFASHGGYLLQGKELKAVQDIILKNGGLNAAIVGQPATKIAEMAGIKVPSNTKILIGEVKVVDESEPFAHEKLSPTLAMYRAKNFEEAVEKAEKLVEMGGIGHTSCLYTDQDNQTARVKYFGDKMKTARILINTPASQGGIGDLYNFKLAPSLTLGCGSWGGNSISENVGPKHLINKKTVAKRAENMLWHKLPKSIYFRRGSLPIALEEVATDGAKRAFIVTDRYLFNNGYADQVTSVLKSHGIETEVFFEVEADPTLSIVRKGAEQMNSFKPDVIIALGGGSPMDAAKIMWVMYEHPETHFEELALRFMDIRKRIYKFPKMGVKAKLVAITTTSGTGSEVTPFAVVTDDATGQKYPLADYALTPDMAIVDANLVMNMPKSLCAFGGLDAVTHALEAYVSVLANEYSDGQALQALKLLKEFLPASYNEGAKNPVARERVHNAATIAGIAFANAFLGVCHSMAHKLGSEFHIPHGLANAMLISNVIRYNANDNPTKQTAFSQYDRPQARRRYAEIADHLGLSAPGDRTAQKIQKLLAWLDEIKAELGIPASIREAGVQEADFLAKVDKLSEDAFDDQCTGANPRYPLISELKQILMDTYYGREYVEEFDREEEVAAATAPKAEKKTKK

SEQ ID NO: 77869 - protein, 391 aa, Yersinia pestis
MHITAKPTSYQCNLKCDYCFYLSKENIFQHKGWMTEETLETFIERYISASGHDVYFTWQGGEPTMAGLDFFEKAIQYQNRYKGTKKIHNALQTNGILLDDAWCLFLRENHFLVGVSIDGPKELHDRYRVTRSGKGSFDKVMAGIEQLKKHQVEFNTLTVINRINVKYPLEVYRTLKSIGAKHIQFIELLETTEPNIDFSNQKSTFELIEFTVPAVDYGHFMAEVFKEWVRHDVGTLFIRQFESFVSRFIGNGHTSCVFQKSCKNNFVMESNGDIYECDHFVYPEYKIGNIYHDKLDSLASDKLSAQKEVLSESCRKCMYKAICYGGCPKHRIDQDSDGMKSYFCAGYKILFSVMVPYMNALAELEKNGIPLDKIMGIVDDIECGIKSQQQH

SEQ ID NO: 77870 - protein, 333 aa, Yersinia pestis
MTTINNHSTVQSSVLLEVKDLTVTFGTSDGDVTAVNALNFALRAGETLGIVGESGSGKSQTAFALMGLLASNGRIGGSAKFNGREILNLPEKQLNRLRAEEIAMIFQDPMTSLNPYMRVGEQLMEVLQLHKKMSKSEAFEESIRMLDAVKMPEARKRMRMYPHEFSGGMRQRVMIAMALLCRPKLLIADEPTTALDVTVQAQIMTLLNELKREFNTAIIMITHDLGVVAGICDKVLVMYAGRTMEYGQARDIFYHPSHPYSIGLLNAVPRLDAEGESLITIPGNPPNLLRLPKGCPFQPRCQYAMDRCSTAPVLEHFGEGRLRACYKPVGELV

SEQ ID NO: 77871 - protein, 636 aa, Yersinia pestis
MGKIIGIDLGTTNSCVAIMDGTKARVLENSEGDRTTPSIIAYTQDGETLVGQPAKRQAVTNPQNTLFAIKRLIGRRFQDEEAQRDKDIMPYKIIAADNGDAWLEVKGQKMAPPQISAEVLKKMKKTAEDYLGEPVTEAVITVPAYFNDAQRQATKDAGRIAGLEVKRIINEPTAAALAYGLDKEVGNRTIAVYDLGGGTFDISIIEIDEVDGEKTFEVLATNGDTHLGGEDFDSRLINYLVEEFKKDQGMDLRTDPLAMQRLKEAAEKAKIELSSAQQTDVNLPYITADGSGPKHMNIKVTRAKLESLVEDLVNRSIEPLKVALQDAGLSVSDIQDVILVGGQTRMPMVQKKVADFFGKEPRKDVNPDEAVAIGAAVQGGVLSGEVKDVLLLDVTPLSLGIETMGGVMTPLITKNTTIPTKHSQVFSTAEDNQSAVTIHVLQGERKRAQDNKSLGQFNLDGIQPAPRGMAQIEVTFDIDADGILHVSAKDKNTGREQKITIKASSGLNEEEIQKMVRDAEANAEADRKFEELVQTRNQADHLIHGTRKQLEEAGDKLPAEDKTAIEEAMKGLEAALKGEDKAEIEAKTQALVQVSGKLLEMAQQQQAAAGGDAGDTSAKKEDDVVDAEFEEVKDKK

SEQ ID NO: 77872 - protein, 312 aa, Yersinia pestis
MELIRGIHNIRARHHGCVLTIGNFDGVHRGHQALLEQLKREGQRLGLPVMVMIFEPQPLELFAADKAPARLTRLRDKAKYLAQAGVDYLLCVKFDPRFAANTAQAFVAQLLVEKLGVKFLTVGDDFRFGAGRQGDFQLLQQAGAEFGFDVISTDSFCDGGLRISSTAIRQALHDDDLVLAETLLGHPYSISGRVVHGDELGRTIGFPTANLPLKRLVAPVKGVYAVDVYGLGSTPLYGVANIGTRPTVAGVRQQLEVHLLDVTMDLYGCHIDVVLRAKLRNEQRFASLEALKQQIANDVVTARTFFGLKTPV

SEQ ID NO: 77873 - protein, 938 aa, Yersinia pestis
MSDYKNTLNLPETGFPMRGDLAKREPDMLKRWYEQDLYGIIRAAKKGKKTFILHDGPPYANGNIHIGHSVNKILKDIIVKSKGMAGYDSPYIPGWDCHGLPIELKVEQLIGKPGEKVSAAEFRTACRKYAAEQVEGQKKDFIRLGVLGDWDHPYLTMDFKTEANIIRALSKIIDNGHLHKGAKPVHWCTDCGSSLAEAEVEYYDKTSQSIDVRFNAVDTATVAAKFGVSAVNGPISLVIWTTTPWTLPANRAISLNAEYLYQLVQVEGECLILAADLVESVMKRAGITQWAVLGSCTGSDLELLRFTHPFMGFDVPAILGDHVTLDAGTGAVHTAPGHGPDDFVIGQKYGLEVANPVGPNGCYLAGTYPTLDGLFVFKANDVVVELLREKGALLHVEKLLHSYPCCWRHKTPIIFRATPQWFISMDQKGLRKQSLQEIKGVQWIPDWGQARIETMVANRPDWCISRQRTWGVPMSLFVHKETEQLHPRSIELMEEVAKRVEQDGIQAWWDLDPAEILGADAADYVKVPDTLDVWFDSGSTHSSVVDVRPEFGGHSPDMYLEGSDQHRGWFMSSLMIATAMKGKAPYRQVLTHGFTVDGQGRKMSKSIGNTISPQDVMNKLGGDILRLWVASTDYTGEIAVSDEILKRSADSYRRIRNTARFLLANLNGFDPAQHQVKPEEMVVVDRWAVGRAQAAQAEIMEAYENYDFHLVVQRLMQFCSVEMGSFYLDIIKDRQYTAKGDGIARRSCQTALFHIAEALVRWMAPIMSFTADEIWNHLPGERQQYVFTEEWYDGLFGLAGNESMNDTFWAELLKVRGEVNKVLEQARSDKRIGGSLEAAVTLYAEPELAARLNSLQDELRFVLLTSAAKVAAYADAGNDAQQSELIAGLKITFNKADGEKCPRCWHYTQDVGLVAEHAELCGRCVTNVAGDGEERKFA

SEQ ID NO: 77874 - protein, 273 aa, Yersinia pestis
MTDSTIRIAIVGAGGRMGRQLIQAVTQMEGVVLGAAIERKGSTLVGSDAGELAGVGLLNVIVGDDLSQLTDNFDVLIDFTRPEGTLEHLAICRQHRKAMVIGTTGFDEAGKAAISEAAADIGIVFAANFSVGVNVVLKLLEKAAKVMGDYTDIEIIEAHHRHKVDAPSGTALAMGEAIADAMGRSLKDCAVYSREGYTGERKPGTIGFATVRAGDIVGEHTAMFADIGERVEITHKATSRMTFAHGAVKSAIWLGKHDNGLFDMRDVLNLNEL

SEQ ID NO: 77875 - protein, 699 aa, Yersinia pestis
MTNPIVASQPQMAQQGIRRLLILSGQADWSRQQAIMLRQHLAGDWLWLSEQPPEGVNSISPTAARTLLGQENLHGVFDATDGLNIEALAIVAGTLRAGSWLLLLVPEWDDWPQRPDKDSLRWSEQPAPIVTANFIRHLQRQFLADPDVVLWQQDRPLILPAVGSRPCWQQPDGSPTAQQQHILQRLMQADSGIWVLTAARGRGKSTLAGMLVTHWQGACWVTGPGKAATQVLNQQAGERARFWAPDALLDYCQRHDVSDIDWLLIDEAAAIPTPLLSALLAYFPRALLTTTVQGYEGTGRGFLLKFCATLGDWHHLTLTDPIRWATDDPLERVMDNAMLFHDELLGNHPLPKRPPVAQIEIPLYEQRDWRDNPELLRRFYGLLSTAHYRTTPLDLRRLMDAPGMHFSAARVADAVIGALWLVDEGGLSEALALDVWAGRRRPRGNLVAQSLAAHSGQWQAPTLLSRRISRVAVTAAWRQQGIARRMIAAEQAHARQQQCDFLSVSFGYTAELAHFWHRCGFRLVRIGSHKEASSGCYTAMALLPLSPAGEALCQAAQQQLKRDWYWLQQWIGIPTPVFLRLPEPPEVTLTDDDWRELAGFAFAFRPLEASLPALQRLLLHTELPLSALRHYLQLRTPQSEIINTLGLIGRKALVALWRQEAAEGMAMIDVDKMIMSAKPSARCSTVRLPGRKNLTICQC

SEQ ID NO: 77876 - protein, 302 aa, Yersinia pestis
MNRLPTLYGIIAILLWSMSVALTRGLAEALGPFGAGSAIYSVSGILVWLVAGKPRVRGQHPAYLYGCGLLFVVYMVAFALAIGMANDRQQTLEIGLINYLWPSLTLLLAVPLLKLRARWWLWPGAALALFGVIWVVSGGEGLDVKTLAVNISSNPLAYSLALIAAFTWAGYSNLVRLYSQGPGALPLFLIACALCLWLMFFMWTPGKLHFTPRAIFELLLMGANTALAYQCWDRAYQCWDSAMKKGNATLVAALSYFTPLLSILIASVWLNTLPSAAFWPGVAMVVAGSLLCWSASRNPLRT

SEQ ID NO: 77877 - protein, 149 aa, Yersinia pestis
MTQEQQLSGGELSLPNGELVLRTLAMPADTNANGDIFGGWLMSQMDIGGAIQAKEIAQGRVVTVRVDGMTFLKPVAVGDVVCCYARCIKTGHSSITINIEVWVKKVSSEPIGQRYRATEAVFTYVAVDDAGKPRGLPSGKGNFEVGATQ

SEQ ID NO: 77878 - protein, 391 aa, Yersinia pestis
MIKSALLVLEDGTQFHGRAIGAEGTAVGEVVFNTSMTGYQEILTDPSYSRQIVTLTYPHIGNVGTNASDEESSAVHAQGLVIRDLPLIASNYRNEEGLSEYLKRHNIVAIADIDTRKLTRLLREKGAQNGCIIVGELSDAALALEKAKAFPGLKGMDLAKEVTTKEMYQWLQGSWTLEGDLPAAKQPEDLPFHVVAYDYGVKRNILRMLVDRGCRLTVVPAQTPAEDVLKLNPDGIFLSNGPGDPEPCDYAITAIKRFLETDIPVFGICLGHQLLALASGAKTVKMKFGHHGGNHPVKDLDASCVMITAQNHGFAVDETSLPSNLRTTHVSLFDGSLQGLHRTDKAAFSFQGHPEASPGPHDAAPLFDHFIELIEAYRASSVSLNCSNSHK

SEQ ID NO: 77879 - protein, 180 aa, Yersinia pestis
MKQLLDFLPLVVFFIFYKMYDIFVASGALIVATLVALAFTWLKYRKVEKMTLVTAAMVLVFGTLTLAFHSDLFIKWKVTVLYVLFALALLVSQWVMKKPLIQRMLGKELTLPDKVWSTLNLSWAIFFLVCGLLNIYVAFWLPQDIWVNFKVFGLTALTLIFTLISGVYIYRHMPEEQKKS

SEQ ID NO: 77880 - protein, 1077 aa, Yersinia pestis
MPKRTDIKSILILGAGPIVIGQACEFDYSGAQACKALREEGYRVILVNSNLATIMTDPEMADATYIEPIHWEVVRKIIEKERPDAVLPTMGGQTALNCALELERQGVLAEFGVTMIGATADAIDKAEDRRRFDIAMKKIGLDTARSGIAHNMEEALAVAADVGFPCIIRPSFTMGGTGGGIAYNREEFEEICERGLDLSPTKELLIDESLIGWKEYEMEVVRDKNDNCIIVCSIENFDAMGIHTGDSITVAPAQTLTDKEYQIMRNASMAVLREIGVETGGSNVQFSVNPKNGRLIVIEMNPRVSRSSALASKATGFPIAKIAAKLAVGYTLDELMNDITGGRTPASFEPSIDYVVTKIPRFNFEKFAGANDRLTTQMKSVGEVMAIGRTQQESLQKALRGLEVGATGFDPKVSLDDPEALTKIRRELKEAGAERIWYIADAFRAGMSVDGVFNLTNVDRWFLVQIEELVRLEESVAELGINGLTAEFMRHLKRKGFADARLAKLVGAAESEVRKLRYKYGLHPVYKRVDTCAAEFSTDTAYMYSTYEEECESNPTSDRPKVMVLGGGPNRIGQGIEFDYCCVHASLALREDGYETIMVNCNPETVSTDYDTSDRLYFESVTLEDVLEIVRIEKPQGVIVQYGGQTPLKLARELEAAGVPIIGTSPDAIDRAEDRERFQQAVNRLGLKQPANATVATIEQAVEKATGLGYPLVVRPSYVLGGRAMEIVYDEIDLRRYFQNAVSVSNDAPVLLDRFLDDAVEVDVDAICDGERVLIGGIMEHIEQAGVHSGDSACSLPAYTLSKEIQDVMRQQVEKLAFELCVRGLMNVQFAVKNNEVYLIEVNPRAARTVPFVSKATGMPLAKIAARVMVGQSLAEQGMLEEIIPPYYSVKEVVLPFNKFPGVDPILGPEMRSTGEVMGVGRTFAEAFSKAMLGSQSGMKKSGRALLSVREGDKHRVVDLAAKLLKQGFELDATHGTAVVLGEAGINPRLVNKVHEGRPHIQDRIKNGEYTYIVNTTAGRQAIEDSKLIRRSALQYKVHYDTTLNGGFATAMALNADPTDQVISVQEMHAKIKNMKA

SEQ ID NO: 77881 - protein, 160 aa, Yersinia pestis
MIISLIAALAADRVIGMENAMPWHLPADLAWFKRNTLNKPVIMGRKTFESIGRPLPGRLNIVISSQPGTDERVTWAASIEEALAFAGNAEEVMVMGGGRVYKQFLDRANRMYLTHIDAEVGGDTHFPDYEPDEWESVFSEFHDADEANSHSYCFEILERR

SEQ ID NO: 77882 - protein, 272 aa, Yersinia pestis
MNNRVHQGHFARKRFGQNFLNDQFVIDSIVSAIHPVPGEAVVEIGPGLGALTEPVAARMDHMTVIELDRDLAARLASHPQLKDKLTIHQQDAMKVNFSELSEQAGQPLRVFGNLPYNISTPLMFHLFSYTDAIRDMHFMLQKEVVNRLVAGPNSKTYGRLTVMAQYYCNVIPVLEVPPTAFTPAPKVDSAVVRLIPHVQMPHPVGDVRMLSRITTQAFNQRRKTVRNSLGDLFTSEQLIELGIDPILRAENISVAQYCKLANWLSAQSTPQK

SEQ ID NO: 77883 - protein, 865 aa, Yersinia pestis
MLEEYRKHVAERAAEGIVPKPLDASQMAALVESLKNPPAGEEEFLLDLLTNRVPPGVDEAAYVKAGFLAAIAKGEAHSPLITAEKAIELLGTMQGGYNIHPLIDALDNEQLAPIAAKALSHTLLMFDNFYDVEDKAKAGNPYAKQIIQSWADAEWYLSRPALAEKLTVTVFKVTGETNTDDLSPAPDAWSRPDIPLHALAMLKNAREGIHPDQPGSVGPIKQIEELNKKGFPLAYVGDVVGTGSSRKSATNSVLWFMGDDIPYVPNKRGGGVVLGSKIAPIFFNTMEDAGALPIEVDVAKLNMGDVIDIFPYQGEVRRHDTGEVLATFELKTDVLLDEVRAGGRIPLIVGRGLTTKARESLGLPVSDVFRVPKPVAKSNKGFSLAQKMVGRACGVAGVRPGEYCEPKMTSVGSQDTTGPMTRDELKDLACLGFSADLVMQSFCHTAAYPKPVDVTTHHTLPDFIMNRGGVSLRPGDGIIHSWLNRMLLPDTVGTGGDSHTRFPIGISFPAGSGLVAFAAATGVMPLDMPESVLVRFKGEMQPGITLRDLVHAIPYYAIQEGLLTVEKKGKKNIFSGRILEIEGLPELKVEQAFELADASAERSAAGCTIKLDKAPITEYLQSNVVLLKWMIAEGYGDRRTLERRINGMESWLANPSLLEGDADAEYAAVIEIDLAEITQPILCAPNDPDDARLLSDVANSKIDEVFIGSCMTNIGHFRAAGKLLDQHKGQLPTRLWVAPPTKMDAAQLTEEGYYSVFGKSGARIEIPGCSLCMGNQARVADGATVVSTSTRNFPNRLGTGANVYLASAELAAIASLLGRLPTPDEYQTYMAQVDKTAEDTYRYLNFDQLSQYTDKADGVIFQTAV

SEQ ID NO: 77884 - protein, 475 aa, Yersinia pestis
MMSTEIKTQVVVLGAGPAGYSAAFRCADLGLETILVERYSTLGGVCLNVGCIPSKALLHVAKVIEEAKALAEHGIVFGEPKTDIDKVRVWKDKVINQLTGGLAGMAKGRKVKVVTGFGKFTGANTLVVDGENGPTTINFDNAIIAAGSRPIQLPFIPHEDSRIWDSTDALALRTVPERLLVMGGGIIGLEMGTVYHALGSKIDVVEMLDQVIPAADKDVVKVFTKRISKQFNLMLETKVTAVEAKEDGIYVTMEGKKAPAEPQRYDAVLVAIGRVPNGKLLDAGQAGVEVDDRGFIHVDKQLRTNVPHIFAIGDIVGQPMLAHKGVHEGHVAAEVIAGMKHYFDPKVIPSIAYTEPEVAWVGLTEKEAKEKGISYETSTFPWAASGRAIASDCADGMTKLIFDKETHRIIGGAIVGTNGGELLGEIGLAIEMGCDAEDIALTIHAHPTLHESVGLAAEIYEGSITDLPNPKAKKK

SEQ ID NO: 77885 - protein, 509 aa, Yersinia pestis
MSIEINVPDIGADEVEVTEIMVKVGDTVEAEQSLITVEGDKASMEVPSPQAGVVKEIKIAVGDKVATGSLIMVFDATGAAAAPVKAEEKPAAPAQVAAPAASAAKNVEVPDIGDDEVEVTEVMVKVGDKVDAEQSLITVEGDKASMEVPAPFAGIVKEIKISTGDKVKTGSLIMVFEVEGAAPAPAAAPAAKAESKGEFAENDAYVHATPVIRRLAREFGVNLAKVKGTGRKGRILREDIQAYVKDAVKRAEAAPAAAGGGLPGILPWPKVDFSKFGEIEEVELGRIQKISGANLSRNWVMIPHVTQFDEADITEVEAFRKQQNIEAEKKKQDLKITPLVFLMKAAAKALEEFPRFNSSISEDGQKLTLKKYINIGVAVDTPNGLVVPVFRDVNKKGIVELSRELSVISKKARDGKLTASDMQGGCFTISSLGGIGGTAFTPIVNAPEVAILGVSKSSMKPVWNGKEFAPRLMLPLSLSFDHRVIDGAAGARFAAYIATIMADIRRLVM

SEQ ID NO: 77886 - protein, 211 aa, Yersinia pestis
MKKITLALLAVASLVPTAASAHEAGDYIFRAGTATVRPNAGSDDVLGNGSFKVDNNTQLGLTFSYLITDNIGVELLAATPFNHKVGLAGVGTIADVKQLPPTLMAQYYFRDKQDKLRPYLGIGLNYTKFFDEKFNATGSDIGLTNLSVKDSWGVAGQAGMDYMVSENWMLNMSVWWMNIESDVKFNLAGEEHSINTRLAPWVFMFGAGYRF

SEQ ID NO: 77887 - protein, 396 aa, Yersinia pestis
MTTLNPYFGEFGGMYVPQILVPALKQLEDAFVSAQLDPEFQAAFQDLLKNYAGRPTALTLCQNLTKGTKTKLYLKREDLLHGGAHKTNQVLGQALLAKRMGKTEIIAETGAGQHGVASALACALLGLKCRIYMGAKDIERQSPNVFRMRLMGAEVIPVHSGSSTLKDACNEALRDWSGTYETAHYMLGTAAGPHPYPTIVREFQRMIGEETKAQILEKEGRLPDAVLACVGGGSNAIGMFADFIDEPDVGLIGVEPAGLGIETGQHGAPLKHGKVGIYFGMKSPMMQTSDGQIEESYSISAGLDFPSVGPQHAYLNSIGRADYVSITDDEALDAFKTLSCKEGIIPALESSHALAHALKMIKADPDKEQILVVNLSGRGDKDIFTVHDILKARGEI

SEQ ID NO: 77888 - protein, 475 aa, Yersinia pestis
MQETGGYKTEGYNVGSDKVDSDKTKTVLHQIVHDKEIWVAARKLQQPLTRFQNEITQSQRDFYHALQGDKTVFILECKKASPSKGVIRDNFNPAEIAGVYKHYASAISVLTDEKYFQGSFDFLPQVSAAVTQPVLCKDFIIDAYQIQLARFYHADAILLMLSVLDDEAYRQLAAVAHSLNMGVLTEASNAEELERAITLGAKVVGINNRDLRDLSIDLNRTRELAPRLPEGVTIISESGISHYRQVRELSQFANGFLIGSALMSEPDLNAAVRRVLLGENKVCGLTRAQDAATAYHAGAVYGGLIFVDSSPRYVDIASARTVISGAPLKYVGVFRHAEIETVRQTAEQLSLAAVQLHGHEDQQYINQLRKVLPADCQIWKALSVGDTMPERNLQQVERYVLDHGTGGTGQRFDWSLLADQALDNVLLAGGLGPDNCDVAAQLGCAGLDVNSGVESAPGIKDPQRIAAVFQALRVY

SEQ ID NO: 77889 - protein, 254 aa, Yersinia pestis
MAYNKIRQPKLSDVIEQQLEYLILEGTLRPGEKLLPERELAKQFDVSRPSLREAIQRLEAKGLLLRRQGGGTFVQTNLWQSFSDPLAELLADHPESQFDLLETRHALEGIAAYYAALRGTDEDLQRIRECHTVIQQAQDNGDLDAEADAVMQYQVAVTEAAHNVVLLHLLRCMGPMLEQNVRQNFELLYLRREMLATVSSHRARIFEAIVAREPEKAREASHRHLAFIEEILLDLSREHSRRERSLRRLQQRKE

SEQ ID NO: 77890 - protein, 333 aa, Yersinia pestis
MMQHLFEKLFRAESMSQEESQQLFAAIVRGELEPSQLAAVLISMKVRGETPAEIAGAAQALLADAQHFPRPDYLFADIVGTGGDGTNSINISTASAFVAASCGVKVAKHGNRSVSSRSGSSDLLAAFGIRLDMSAEQSRLALDDLGVCFLFAPQYHTGFRHAMPVRQQLKTRTLFNVLGPLINPARPPLALIGVYSPELVLPIAQTLKVLGYQRAAVVHGGGMDEVAIHAPTQVAELNNGSIESYQLTPEDFGLNRYPLAALQGGMPEENRDILARLLQGKGETAHAAAVAANVALLLKLYGQENLRHNAQQALEMIHSGQAFDRVTALAARG

SEQ ID NO: 77891 - protein, 299 aa, Yersinia pestis
MKELTDATTLSTAFTLYDLHSHTTASDGTLTPSELVIRAAQMRVGVLAITDHDTTAGLAEAAAAIEQHQLALRLIPGVEISTLWENHEIHIVGLGIDVQHVSLRTLLEAQSEHRYQRAQEISTRLEKARIVGAWEGANRLANGGQVTRGHFARYLVELGLASNVGQVFKKYLAKGKTGYVPAQWCTIEQAIDAIKQSGGQAVLAHPGRYDLTAKWLKRLLAHFAEHGGDAMEVAQCQQAPHERALLGQYARDYHLLASQGSDFHQPCSWIELGRKLWLPAGVEPVWRDWPTEPAMPLVR

SEQ ID NO: 77892 - protein, 318 aa, Yersinia pestis
MGEKLQKILARAGHGSRREIEAIIQQGRVSVDGKVSKLGDRVEVTQSTKIRLDGHLLSIKESEENVCRVLAYYKPEGELCTRNDPEGRPTVFDRLPKLRGSRWVAVGRLDVNTSGLLLFTTDGELANRLMHPSREVEREYAVRVFGQIDDDKIKQLSRGVQLEDGPAAFRTISYQGGEGINQWYNVTLTEGRNREVRRLWEAVGVQVSRLIRVRYGDINLPKGLPRGGWTELDLKATNYLRELVELDVETVSKLPVEKDRRRVKANQIRRAVKRHTEVSGRQVAGRQGSARKGSTRQNVGNAAPAATASRRSGPKKRG

SEQ ID NO: 77893 - protein, 253 aa, Yersinia pestis
MHYQPKHDLLNQRIILVTGAGDGIGREAALTYARFGARLILVGRTESKLLAVKKQIADAGGLPALVLSLDLLHATAADCQQLADTVSAQVPRLDGVLHNAGLLGEVAPMSEQSIAVWQDVMQVNVNATFMLTQALLPLLLKSPSASLVFTSSSVGRQGRAGWGAYSVSKFATEGMMQVLAEEYKQSNLRVNCINPGGTRTQMRATAFPDEDASKLKTPADIMPLYLYLMGDDSRRKTGISFDAQPGRKPGPAE

SEQ ID NO: 77894 - protein, 871 aa, Yersinia pestis
MGKALVIVESPAKAKTINKYLGNDYVVKSSVGHIRDLPTSGSASKKSANSAEEKAKKDDKPKKKVKKDEKVALVNRMGVDPYHGWKAQYEILSGKEKVVAELKALAENADHIYLATDLDREGEAIAWHLREVIGGDDKRFSRVVFNEITKNAIQQAFNQPGELNISRVNAQQARRFMDRVVGYMVSPLLWKKIARGLSAGRVQSVAVRLVVEREKEIKAFVPEEYWELHADLVAKGDIPIQMEVTHAHGKPFKPVNREQTHAALTLLENARYKVLDREDKPTSSKPSAPFITSTLQQAASTRLSFGVKKTMMMAQRLYEAGHITYMRTDSTNLSQDALTMVRGYIGDNFGDKYLPATPNQYSSKENSQEAHEAIRPSDVNVLAEQLKDMEADAQRLYQLIWRQFVACQMPPAKYDSTTLTVQAGDFQLRAKGRTLRFDGWTKVMPALRKGDEDRTLPVIEVGSDLDLQKLIPSQHFTKPPARYSEASLVKELEKRGIGRPSTYASIISTIQDRGYVRVENRRFYAEKMGEIVTDRLEENFRELMNYDFTARMESGLDQVANDQAEWKAVLDGFFAEFSEQLEKAEKDPEEGGMRPNQMVMTSIDCPTCGRQMGIRTASTGVFLGCSGYALPPKERCKTTINLVPDAEILNILEGDDAETNALRARRRCQKCGTAMDSYLIDNQRKLHVCGNNPACDGYEIEAGEFRIKGYEGPIVECEKCGSEMHLKMGRFGKYMGCTNDECKNTRKILRSGEVAPPKEDPVPLLELPCEKSDAYFVLRDGAAGVFLAANTFPKSRETRAPLVEELVRFKDRLPEKLRYLADAPVVDKEGNKTLVRFSRKTKQQYVSSEKDGKATGWSAFYIDGKWVEAKK

SEQ ID NO: 77895 - protein, 250 aa, Yersinia pestis
MSDLTSTILFEHPLNEKMRTWLRMEFLLQQLESHRSLDNIANALTFFRTASDLIDVLERGEVRTDLLKELERQQQKLQQWADIPGVDVSLVDSLRNQLKSRAAVLMSAPRIGQSLKEDRLISVVRQRLSIPGGCCSFDLPTLHVWLHQPSEQRDQHINKLLASLAPLHQSLTIILDLIRQSCPLRSQISLNGFFQDNAGGADLLRLRLPLDPQLYPQISGHKTRYAIRFLALDSENGTVPARLSFELACC

SEQ ID NO: 77896 - protein, 782 aa, Yersinia pestis
MQLIEIENEVLSGQDAFPLSFKTQEKVSGNPSYQLVFQVAEADLDLVSLLGEIIKVRIELPDSAGYRTFFTYVIAGADEGQRQDKFVYSLELSTWTWFLMQNRNCRIFQDLNIIDIIEQVFSKYNFADYRFDIVGNYRLREYCVQFAETDFDFVNRLMEDEGVWYYFEHNEDKHTLVMTDQQQFPVLEGHYAELSFLPDSEEMRAIREGIQRIQRSQRIHSSEIVLRDFDFLNPRNTLQTHIEESRQHLQGVPLEWYDYAAGYTDPQHGESIARLRLEAIQSNGQLLSGESNATGLVPGRSFALVQHPDNNRNRGFKLISCDYSFVQDGPDSASQGRNVACKFKALNDDVVYRPQCVTPPPKVPGVQSATVVGARESEVHTDKFARIRVHFHWDRYKTTEDDSSCWIRVVQAWAGKGWGVLAMPRVGQEVLVNYVDGDLDRPMVTGIVYNGENPPPYRLPDHINYSGFVSRSLRFGQPQHASQLTFDDNRGNERIMLHAERDLQRTVERNSATAVGQDKYDTVERTATEWINNHISYKDFSFSVTGMSVSATGISVSTTGTSLSVTGMSTSVTGVSVGFTLIGTSFTGVSTSFTGVGTSFTGASNSLTGVSNSMTGCSSSFTGTSNSMTGSSHSMTGMSTSITGHSMSQTGSSSSITGDSTSFTGSSVSSTGSSVSTTGVSTSTTGSSTSTTGCSVSTTGSSTSTTGNSVSMTGNSTSTTGCSISTTGSSIGTVGSSISTTGSSVSTTGSSISTTGLSVSYTGAQYSDVGVDLKTVGMQSKN

SEQ ID NO: 77897 - protein, 367 aa, Yersinia pestis
MTPSDTPIMPPDSPRRIIGRHFTQRQLQQLTLSEVYFIQCTFTDISFAEIAVRNIHFESCHFTHLRLDGGRVENCSFRFCKFNDVSAQGVSILNTSCIEVQWQGCYLTGCLIERWLLTSCQLDDAQLQDIQLNYWTVQDTPMTHLTMSDSKMQDSSWHGCTIQQSVWKNSELIRQVMGSCVLKECQYQAIQSDTVVWSQCQLEQVDFRHQPLENSNFHKSTLTQCGFSDANLAAALFSEATLEGCDFNMAQLAAAQFVDATLRDCNFDTADLQNASLLRANLTRCHLTQVNLTKADLRSCMLSESSLQASKLSKTRIHGAQIPTLDTPLQMPDPLLSQIDNWYGHHQPGPKNNPKFPSIPSGASRYV

SEQ ID NO: 77898 - protein, 253 aa, Yersinia pestis
MYNMAKRVTIGTVILLLPTLAIWLSDWQWQPGGNNTWLKGFFWVTETVTAPWGILTSVLLCSWFLWCLRVRFKPAVGLFVVLGAVIVLGQGVKSLIKEQVQEPRPFVAWLEAEHHINNRLFYSLPRAERSELVRQQLQDQLIIPVWLSRHWQFETGFSFPSGHTVFAATWALLAVGLLWPRRHYKTVVLLMLWAQGVMASRLFLGMHWPQDLIAATLISGVLAAVACGLLQHGFGLLDIPQSEQKESEKRGHE

SEQ ID NO: 77899 - protein, 419 aa, Yersinia pestis
MALSDVKVRTAKPEAKAYKLTDGEGMVLLVHPNGSKYWRLRYRFDGKEKMLALGKYPEISLADARARRDEARKQLANGVDPSESKKAVKVEQEQEAITFEVVAREWHASNRQWSEAHSARVLKSLEDNLFQAIGKRNIADLGTRDLLPPIKAVEMAGRLQVASRLQQRTTAIMRYAVQSGLIDYNPAQEMAGAVATGKRKHRAALELNRVSELLHRIDYYSGRPLTRLAVELTLLVFIRSSELRFARWSEVDFETAMWTIPGEREPLEGVKHSHRGSKMRTPHLIPLSRQALAILEKIKSMSGNRELIFIGDHDPRKPMSENTVNKALRVMGYDTKVEVCGHGFRTMACSSLIESGLWSRDAVERQMSHQERNSVRAAYIHKAEHLDERRLMIQWWADYLDANREKGVSPFDFAKLNTS

SEQ ID NO: 77900 - protein, 231 aa, Yersinia pestis
MLNELKQQVLAANLALPRHNLVTFTWGNVSAIDRQKGLLVIKPSGVEYASMTLDDMVVVELESGNVVEGSKKPSSDTDTHRVLYLNFPQIGGIVHTHSRHATIWAQAGLDLPAWGTTHADYFYGSIPCTRLMTHEEIAGRYEWETGNVIVDTFHERGITPDAVPAVLVNSHGPFAWGSSAENAVHNAVVLEELAYMGIFSRQLNPQLGDMQPQLLDKHYLRKHGKDAYYGQ

SEQ ID NO: 77901 - protein, 503 aa, Yersinia pestis
MEFSVKSGSPEKQRSACIVVGVFEPRRLSPIAEQLDKISDGYISALLRRGELEGKVGQTLLLHHVPNILSERILLIGCGKERELDERQYKQVIQKTINTLNDTGSMEAVCFLTELHVKGRNTYWKVRQAVETAKETLYTFDQLKSNKTEPRRPLRKMVFNVPTRRELTSGERAIQHGLAIASGIKAAKDLGNMPPNICNAAYLASQARQLADAFSTNTVTRVIGEQQMKELGMHAYLAVGHGSQNESLMSVIEYKGNPNKDAKPIVLVGKGLTFDSGGISIKPAEGMDEMKYDMCGAATVYGVMRVVAELQLPLNVVGVLAGCENMPGGRAYRPGDILTTMSGQTVEVLNTDAEGRLVLCDALTYVERFEPELVIDIATLTGACVVALGNHLTGLMSNHNPLAHELIGASEQAGDRAWRLPLGEEYYEQLDSNFADMANIGGRAGGAITAGCFLSRFTRKYSWAHLDIAGTAWRSGKNKGATGRPVALLSQFLLNRAGLNGDD

SEQ ID NO: 77902 - protein, 221 aa, Yersinia pestis
MELYLDTADVAAVKRLARVLPLQGVTTNPSILAKAGKSLWEVLPALRDALGGTGKLFAQVLASDSERMVSEAVQLSEQIPGLVIKIPVTAEGLAAIKKLKTMSIPTLGTAVYGAGQGLLSVLAGAEYVAPYVNRLDAQGSDGIAMVRELQQLLTLHAPNAKVLAASFRTPRQVLDCLLAGCQSVTIPVDVAEQFISTPAVKAAIEQFEQDWQGAFGTTMLS

SEQ ID NO: 77903 - protein, 101 aa, Yersinia pestis
MVNSGIPYRSRPITGGKITRCVPLTQVEAAPTTLWAWVRLITHRLAQSFRLMVGVQDYSNYVNHMRHKHPDTPPMTEREFHRYCLDARFPSEGGKLGKCPC

SEQ ID NO: 77904 - protein, 330 aa, Yersinia pestis
MFKHIISCLLLISATSALAAEKPTLTVYTYDSFAADWGPGPAIKQAFEAECDCQLKFVALEDGVSLLNRLRMEGKNSQADVILGLDNNLVQAAEQTGLFTPSQVDTRNLTLPEPWQNKTFVPYDYGYFAFVYNKEKLKNPPKSLHELISSKEPWKVIYQDPRTSTPGLGLMLWMQKVYGDQAPQAWQQLAQKTVTVTKGWSEAYGLFLKGEADLVLSYTTSPAYHLIAEKNNNYAAADFSEGHYLQVEVAGQLAASKQPELAQRFMQFIVTPAFQNHIPTGNWMYPVIKMDLPAGFETLAVPQTALQFDAKDVADNRSKWIQAWQSAVSR

SEQ ID NO: 77905 - protein, 553 aa, Yersinia pestis
MSTSRLQQQFIRLWQRYNGQSTETTLQALAEVLNCSRRHVRSLLGKMQHAGWLDWQAEAGRGKRSQLIFLRSGLALQQQRAEELLEQDHIDQLVQLVGDKKAVRQMLLSQLGRSFRQGKHILRVLYYRPLENLLPGTALRRSETHMVRQIFNGLTRINEENGELEPDLSHHWQAITPLHWRFYLRPAIHFHHGRELEMSDVISSLTRLIPQPLFSHIAEVRSPTPYVIDVYLHSPDHWLPWLLGSVHAMILPQEWETQPDFHRQPIGTGPYSVIRNHHSQLKIQAFDNYFGFRALIDEVNIWVLPELSEELVYSGVQLQADDTGKNELESRLEEGCYFLLFDQRSPQACTPEIRRWLCELITPIALLSHAAPFYQRYWSPAYGMLPRWHHNRLTTQEPKPEGLNELTLTFYSEHSEFDAISQTLTQLLAAQGVTLKIQVLDYTRWYQGDAQSDIWLGSANFYLPLEFSLFATLYEMPLLQHCLSEELHQDIESWRNNTLLMADWSQRLVSQHQFHPLFHHWLELYGQHSMRGVRMNTLGWFDFKSAWFTPPEA

SEQ ID NO: 77906 - protein, 149 aa, Yersinia pestis
MKNATFYLLEHDTPAGELRAHEALACEIAAERWRAGKRVLIACESQEQAQRLDEALWQRAPEQFVPHNLAGEGPKYGAPVELAWPERRGNSPRDLLISLLPEFAGFATAFHEVVDFVPYEENLKQLARDRYKSYRSVGFHLTTATPPTN

SEQ ID NO: 77907 - protein, 965 aa, Yersinia pestis
MENTPSHINKTEPSLDKTYSPQEIEQPLYEHWEKQGYFKPNGDTSKESYCIMIPPPNVTGSLHMGHAFQQTIMDTLIRYQRMQGKNTLWQAGTDHAGIATQMVVERKIAAEEGKTRHDYGRDAFIDKIWEWKGESGGTITRQMRRLGNSVDWERERFTMDEGLSNAVKEVFVRLHKEDLIYRGKRLVNWDPKLRTAISDLEVENRESKGSMWHLRYPLADGAKTAEGKDYLVVATTRPETVLGDTGVAVNPEDPRYKDLIGKEVILPLVGRRIPILGDEHADMEKGTGCVKITPAHDFNDYEVGKRHALPMINILTFDGDIRSEAEVFDTHGEATDAFSNAIPAQFQGLERFAARKAVVAEFEKLGLLEEVKPHDLTVPYGDRGGVVIEPMLTDQWYVHTAPLAKVAIEAVENGEIQFVPKQYENMYYSWMRDIQDWCISRQLWWGHRIPAWYDEQGNVYVGRDEAEVRRDNNLGAEVALRQDEDVLDTWFSSGLWTFSTLGWPEQTDALKTFHPTSVVVSGFDIIFFWIARMIMLTMHFMKDENGKPQVPFKTVYMTGLIRDDEGQKMSKSKGNVIDPLDMVDGISLEALLEKRTGNMMQPQLAEKIRKRTEKQFPNGIEPHGTDALRFTLAALASTGRDINWDMKRLEGYRNFCNKLWNASRFVLMNTEGQDCGQNGGEMVLSLADRWILAEFNQTIKAYREAMDTYRFDLAAGILYEFTWNQFCDWYLELTKPVMNSGSEAELRGTRHTLIQVLEALLRLAHPIIPYITETIWQRVKNLKGITADTIMLQPFPEYDASQVDEQALSDLEWIKQTIIAVRNIRAEMNIAPGKPLEVMLRGANAQAQRRVLENQSFIQSLARLSSLTLLAEGDKGPVSVTKLVEGAEVLIPMAGLIDKATELDRLAKEVAKLDAEIERIEGKLGNEGFVARAPEAVVAKERERLAACAEAKQKLIEQQATIAAL

SEQ ID NO: 77908 - protein, 167 aa, Yersinia pestis
MTTTTPIRLLVRPITAGDNLAIANVIREVSAEFGLTADKGYTVSDPNLDHLYELYSQPRSAYWVIEVDGHIAGGGGVAPLLGGEADLCELQKMYFLPILRGKGLAKQLALQALAFARQQGFGRCYLETTASLTSAVGLYERLGFEHIGGAMGNTGHVDCEVTMLKTL

SEQ ID NO: 77909 - protein, 335 aa, Yersinia pestis
MNQFYKRHFLRLLDFTPAEIIALLDLATELKKDKKSGCEQQKLVGKNIALIFEKDSTRTRCSFEVAAYDQGARVTYLGPGGSQIGHKESIKDTARVLGRMYDGIQYRGYGQRVVETLAEFAGVPVWNGLTDEFHPTQLLADLLTMREHLPNKSLNKMTLAYLGDTRNNMGNSLLEAAALVGMDLRLVAPKACWPEEAFVISCQALAQKTGGKITLTEDIAEGVNGADFLYTDVWVSMGEPKEVWQERINLLKPYQVNMRVLTLTGNPQVKFLHCLPAFHDDQTTIGKQMAEQYDLPGGMEVTEEVFESAHSIVFDQAENRLHTIKAVMVATMSKI

SEQ ID NO: 77910 - protein, 476 aa, Yersinia pestis
MGTTSSQSKTLYQKLYDAHIVHEAPNETPLLYIDRHLVHEVTSPQAFDGLRAMGRPVRQPGKTFATMDHNVSTQTKDINASGEMARIQMQELIKNCAEFGVSLYDLNHPFQGIVHVIGPEQGMTLPGMTIVCGDSHTATHGAFGSLAFGIGTSEVEHVLATQTLKQGRAKTMRIEVNGTVGAGITAKDIVLAIIGKTGSAGGTGHVVEFCGSAIEALSMEGRMTLCNMAIEMGAKAGLVAPDDTTFAYLKGRQFAPTGEQWEQGVAYWRTLKSDADAQFDTIVTLDAADIAPQVTWGTNPGQVIAVNQIIPAPESFSDPVERASAEKALAYMDLRPGIKLTEVAIDKVFIGSCTNSRIEDLRAAAAIAQGRKVAKGVQAIVVPGSGPVKAQAEAEGLDKIFIAAGFEWRLPGCSMCLAMNNDRLEPGERCASTSNRNFEGRQGRGGRTHLVSPAMAAAAAVSGHFADVRELSATTH

SEQ ID NO: 77911 - protein, 575 aa, Yersinia pestis
MEMLSGAEMVVRSLIDQGVKHVFGYPGGAVLDIYDALHTVGGIDHVLVRHEQGAVHMADGYARATGEVGVVLVTSGPGATNAITGIATAYMDSVPMVVLSGQVPSSLIGFDAFQECDMVGISRPVVKHSFLVKRTEDIPMVLKKAFYLASTGRPGPVVIDLPKDIVGPAVKMPYAYPEQVSLRSYNPTVQGHRGQIKRALQTIMAAKRPIMYVGGGAINAACHEELLILAEKLNLPVTSSLMGLGSFPGTHRQSVGMLGMHGTFEANMAMHNTDLIFAVGVRFDDRTTNNLAKYCPDATVLHIDIDPTSISKTVTADIPIVGDAKQVLTQMLDLLSQVGCTQDFDSLRDWWQSIEQWRTRNCLGYNKDSGKIKPQAVIEALHRLTKGDAYVTSDVGQHQMFAALYYPFDKPRRWINSGGLGTMGFGLPAALGVKLALPNETVVCVTGDGSIQMNIQELSTALQYNLPVLVLNLNNRYLGMVKQWQDMIYSGRHSQSYMDSLPDFVKLAEAYGHIGVAINTPDELESKLADALTQLSETNRLVFVDVTVDETEHVYPMQIRGGGMDEMWLSKTERT

SEQ ID NO: 77912 - protein, 164 aa, Yersinia pestis
MRRRILSVLLENESGALSRVVGLFSQRGYNIESLTVAPTDDPTLSRMTIQTVGDAKVLEQIEKQLHKLVDVLRVSELVSGSHVEREIMLVKLQASGYGREEVKRCAEIFRGQIVDVTATLYTVQLAGTSEKLDAFLNAVREVAEIVEVARSGIVGVSRGDKIMR

SEQ ID NO: 77913 - protein, 144 aa, Yersinia pestis
MINGPGTRCTLFVSGCVHQCVGCYNKSTWRLNSGKPFTREMEDKIIADLNDSRIRRQGLSLSGGDPLHPQNLSAILQLVQRVHHECDGKDIWLWTGYTLAELTAEQQQVVDLINVLIDGKFVQDLKDPSLIWRGSSNQVIHCLR

SEQ ID NO: 77914 - protein, 699 aa, Yersinia pestis
MFMRSTLIPSTFILSTLLLPAVVLAEDTIIVERNRSQTDSYQATTSVTANRSPANIIDTPQNVTVVTHPVLEDYDVTNLGEALYFVSGITQSNTLGGTQDALIKRGFGNNRDGSILHDGIRSIQARNFTPTSERVEVLKGPSSMLYGMNEPGGLINVISKKPQLDPHVHLEANASSFKGGGGQLDVTGPLGESGFAGRLIIDHQETDYWRNFGRNRQTVVAPSLDWYGENTTVHLAWERMEYLVPFDRGTVIDPRTGKPVDTPRDRRFDESYNATRGDQDTVTFSINHDLNEFWSTQLNYAFSRNSYSDNQARATAFNAETGVLTRQSDATANAKSHSQAVQWVVNGDLDWGFTHHQLMFGIDYEARRVFRGDMIRGSKNNGFNVYDPIYGTLPPSTAVSAADSDQRENIDSRALFIQDSMRLNEHWLLLGGLRYDSFDVMAGKGRPFKKNTDSSDSRLVPRAGVVYNLNDWSSLYVSYTESFKPNVSIATAIDALPPEYGKSWEAGYKIDINNRVTGTLAVYDIHKRNIMVSELVDGETVTRTAGKARSRGLELDMAGKVTDSLSLIGSYAYTDARLTEDPDNNGNDLPNVARHTAALFLSRDFGSTSLISGDEVKAGIGARYVGKRAGDAANSFWLDNYTVADAFIAWKMPLSGYQLKWQLNVKNLFDKTYYPSSANNLRIAIGEPRQVVLQGSIDF

SEQ ID NO: 77915 - protein, 152 aa, Yersinia pestis
MFRGATMVNLDSKGRLAVPTRYRESLNEESQGQMVCTIDLHQPCLLLYPLPEWEIIEQKLSRLSSMNPAERRVQRLLLGHASECQMDGAGRLLIAGTLRQHAGLNKEVMLVGQFNKFELWDEQTWYQQVKDDIDAEQSTQEPLSERLQGLSL

SEQ ID NO: 77916 - protein, 320 aa, Yersinia pestis
MVDNNKTVDNNYKHTSVLLDEAVKGLNIRDNGIYIDGTFGRGGHSRLILSQLGPEGRLIAIDRDPEAIEAAKQITDPRFSIVHGPFSDLAHYVRDLDLVGRIDGILLDLGVSSPQLDDAERGFSFMRDGPLDMRMDPSRGLSAAEWLMKASADDIAWVLKTFGEERFAKRLAKAIVERNLTQPMTRTKELADLIANASPFRDKHKHPATRSFQAIRIYINSELEEIERALDGAHEVLAPEGRLSVISFHSLEDRIVKNFIRHHSRGPQVPAGLPLTEAQLRSMGGRTLKSVGKMMPGDAEIAENPRARSSVLRFAERIGE

SEQ ID NO: 77917 - protein, 587 aa, Yersinia pestis
MKTARPGKLKRQEEQASFISWRFALLCGCILLALVGLIMRTAYLQVINPDKLVREGDMRSLRVQEVPTARGMISDRSGRPLAVSVPVNAVWADPKELIEQGGISLDTRWKALSDALEIPLDQLATRINANPKGRFVYLARQVNPAIGDYIRKLKLPGIHLRQESRRYYPAGQVMAHIIGVTNIDGQGIEGVEKSFDRWLTGQPGERTVRKDHYGRVIEDISSVDSQAAHNLVLSVDERLQALVYRELNNAVAFNKAESGTAVLVDVNTGEVLAMANSPSYNPNNLTGTPKDAMRNRAITDIFEPGSTVKPMVVMTALQHGVVKENSVLNTLPYFVNGHQIKDVARYAELSVTGILQKSSNVGVSKLALAMPSSALVDTYSRFGFGKATNLGLVGESSGLYPKKQRWSDIERATFSFGYGLMVTPLQLARVYATIGSMGVYRPLSITRVDPPVAGERIFPEPLVRTVVHMMESVALPGGGGTKAAIKGYRIAIKTGTAKKVGPDGKYMDRYLAYTAGVAPASNPRFALVVVINDPQAGKYYGGAVSAPVFGAIMGGVLRTMNIEPDALPTGDKSELVINTKEGSGGRS

SEQ ID NO: 77918 - protein, 490 aa, Yersinia pestis
MRDLFAPWGLDVPERALREMTLDSRIAAAGDLFVAVVGHQTDGRRYIPQAIAQGVAAIVAEADGVAPDVSVAEIHGVPVIYLRNLNQHLSTLAGQFYHQPGAALRLVGVTGTNGKTTTTQLLAQWSQALGETSAVMGTVGNGLLGQVIPTENTTGSAVDIQHLLRNLVDQGATFAAMEVSSHGLIQDRVAALSFAAVVFTNLSRDHLDYHGNMTSYEAAKWLLFSTHQSEHKIINADDDVGRRWLSQLPQAVAVSMAGNVPKGWNGPWLSANKVIYHDNGASIAFDSSWGEGELESRLMGAFNVSNLLVALATLLVQGYPMAQLLAAAPHLQPVCGRMEVFNAPGKPTVVVDYAHTPDALEKALAAARLHCTGKLWCVFGCGGDRDKGKRPLMGGIAEQLADCVVVTDDNPRSEEPQAIVADILSGLLDAGRVQAIHGRAEAVTSAIMQAKEDDVVLIAGKGHEDYQLVGNRRLDYSDRVTVARLLGGQA

SEQ ID NO: 77919 - protein, 458 aa, Yersinia pestis
MIKVSLRFLASLLNAEYIVAESVSDDIEITEVTIDTRKVTAGCLFVALKGERFDGHDFAEDAIAAGAGALLVSKRLLVGGPQLVVKDTRLALGQFAAWVRQQVPARIVALTGSSGKTSVKEMAAAILRQCGNVLYTAGNFNNDIGVPLTLLRLTAEHDFAVIELGANHVGEIAYTTDLSRPESALVNNLAAAHLEGFGSLAGVAQAKGEIFAGLPANGTAIINADSNDWPHWQETLHNKRVWRFSPHAAEHIDFYASDVRITPQLTSFTLHSPFGTVAIELPLPGQHNIANALAAAALAMSVGADLAAVRQGLAQLQAVPGRLFPVPLAEGQLLLDDSYNANVGSMIAAAQVLAEMPGYRVMVVGDMAELGETAADCHRQVGEAAKLAGVDKVLSVGTLSQILSSASGNGEHFQDQNTLSTRVNALLNEYPVITVLIKGSRSAAMENVVRALQEKASC

SEQ ID NO: 77920 - protein, 360 aa, Yersinia pestis
MLVWLAEYLVKFYSGFNVFSYLTFRAIVSLLTALFISLWMGPHLIAWLQKLQIGQVVRNDGPESHFSKRGTPTMGGLMILFSITISVLMWAYPSNPYVWCVLFILIGYGIVGFIDDYRKVVRKNTKGLIARWKYFWQSIIALAAAFTMYSIGKDTSATELVVPFFKDIMPQLGLLYVLLAYFVIVGTSNAVNLTDGLDGLAIMPTVFVAAGFALVAWATGNVNFAAYLHIPYLRHAGELVIVCTAIVGAGLGFLWFNTYPAQVFMGDVGSLALGGALGTIAVLLRQEFLLVIMGGVFVVETLSVILQVGSFKLRGQRIFRMAPIHHHYELKGWPEPRVIVRFWIISLMLVLIGLATLKVR

SEQ ID NO: 77921 - protein, 378 aa, Yersinia pestis
MILNNVSLILEDSVVSGSLEIVDGVIRSYSDRPTQLPAAIDGENGWLLPGLIELHTDNLDKFFTPRPNVDWPAHSAMSSHDALMVACGITTVLDAVAVGDVRDGGHRLDNLQKMINAVVDSQRAGLNRAEHRIHLRCELPYENTLPLFEALMAQPALSLVSLMDHSPGQRQFASREKYREYYQGKYHLSDPQMAAFEEEQVALSTRWAGPNRSAIAAQCRERGIALASHDDATAAHVAESQALGSVIAEFPTTEVAATASHQLGLQVLMGAPNIVRGGSHSGNVAAHHLASLGVLDILSSDYYPASLMDAAFRIAHDESNRFTLPQAVNLVTRNPARALGLNDRGVIAEGKRADLILARAHGENVYVQNVWRQGVRVF

SEQ ID NO: 77922 - protein, 91 aa, Yersinia pestis
MAKVDVKCPFCEQFHPVKKHGPGRTGHQRYRCQACRRSFQLEYEYRACHPGMKEQIVDLAMNNAGIRDTARALHISINAVMRTLKNSRRSV

SEQ ID NO: 77923 - protein, 91 aa, Yersinia pestis
MAKVDVKCPFCEQFHPVKKHGPERTGHQRYRCQACRRSFQLEYEYRACYPGMKEQIVDLAMNNAGIRDTARALHISINAVMRTLKNSRRSV

SEQ ID NO: 77924 - protein, 438 aa, Yersinia pestis
MVDYQGKKVVIIGLGLTGLSCVDFFIARGVTPRVMDTRINPPGLDQLPESVEQHVGDLNQEWLLDADLIVVSPGMALAHPALSEAAEAGVEIIGDIELFCRENQAPVVAITGSNGKSTVTTLVGEMAKAAGWSVGGGGNIGVPALTLLKQDNQLTVLELSSFQLETTHSLRASAATILNVTEDHTDRYPLGLQQYRAAKLRVYENAKVCVVNADDALTMPVRGADSRCISFGVDVGDYHLNKQQGEIWLRVRGEKVLNTREMKLSGRHNYTNALAALALADAVGIPRASSLKALTTFSGLPHRFQLVLERHGVRWINDSKATNVGSTEAALDGLQVDGTLHLLLGGDGKSADFSGLTHFLQGDRIKVYCFGRDGGQLAALRPDVSQLTETMAQAMALVAKVVLPGDRVLLSPACASLDQFRSFEHRGNEFARLAEELG

SEQ ID NO: 77925 - protein, 400 aa, Yersinia pestis
MRMPGLGLFNTLKHYVMGSRESDTTSMVLYDRTLLWLTFGLAIIGFVMVTSASMPIGQRLANDPFLFAKRDALYLALAFGLSLVTLRIPMDVWQRYSNIMLLISIVLLLVVLVVGSSVNGASRWIALGPLRIQPAELSKLSLFCYLASYLVRKVEEVRSNFWGFCKPMGVMVILAVLLLAQPDLGTVVVLFITTLAMLFLAGAKMWQFMAIIGSGAFAVCLLIIAEPYRMRRVTSFWNPWADPFGSGYQLTQSLMAFGRGEFWGQGLGNSVQKLEYLPEAHTDFIFSILGEELGYFGVVLALLMVFFVAFRAMSIGRRALEIGQRFSGFLACSIGIWFSFQALVNVGAAAGMLPTKGLTLPLISYGGSSLIIMSTAIVLLLRIDFETRLAKAQAFVRSAR

SEQ ID NO: 77926 - protein, 356 aa, Yersinia pestis
MSGKTKRLMVMAGGTGGHVFPGLAVAHHLMAQGWQVRWLGTADRMEASLVPQHGIEIDFIKISGLRGKGLMAQLTAPIRIYRAVRQAQKIMRDYQPNVVLGMGGYVSGPGGLAAWLCGVPVVLHEQNGIAGLTNRWLARIAKKVLQAFPGAFPNADVVGNPVRTDVLALPLPAVRLSGREGPIRVLVIGGSQGARILNQTLPLVAASLGEQITLWHQVGKGALPEVSQAYQQAGQAGHLVVEFIDDMAAAYAWADVVVCRSGALTVSEVAAAGLPAIFVPFQHKDRQQYWNALPLEKAGAAKIIEQPQFTATSVSSLLASWDRATLLSMAERARSVAIPDATERVAAEVVAASKSA

SEQ ID NO: 77927 - protein, 491 aa, Yersinia pestis
MNTQQLAKLRTIVPEMRRVRHIHFVGIGGAGMGGIAEVLANEGYQISGSDLAPNSVTQHLTALGAQIYFHHRPENVLDASVVVVSTAISADNPEIVAAREARIPVIRRAEMLAELMRYRHGIAVAGTHGKTTTTAMLSSIYAEAGLDPTFVNGGLVKAAGTHARLGSSRYLIAEADESDASFLHLQPMVAIVTNIEADHMDTYQGDFENLKQTFINFLHNLPFYGRAVMCIDDPVVRELLPRVGRHITTYGFSDDADVQIASYRQEGPQGHFTLRRQDKPLIEVTLNAPGRHNALNAAAAVAVATEEGIEDEDILRALVGFQGTGRRFDFLGNFPLAPVNGKEGSAMLVDDYGHHPTEVDATIKAARAGWPDKRIVMLFQPHRYTRTRDLYDDFANVLSQVDVLLMLDVYAAGEPPIPGADSRALCRTIRNRGKLDPILVPDSESAPEMLAQILNGEDLILVQGAGNIGKIARKLAEHKLQPQLKDEEHHG

SEQ ID NO: 77928 - protein, 306 aa, Yersinia pestis
MAEKVAVLLGGTSAEREVSLLSGQAVLAGLKEAGIDAYGVDTKDFPVTQLKEQGFDKVFIALHGRGGEDGTLQGVLEFLQLPYTGSGVMASALTMDKLRTKLVWQALGLPISPYVALNRQQFETLSPEELVACVAKLGLPLIVKPSHEGSSVGMSKVDHASELQKALVEAFQHDSDVLIEKWLSGPEFTVAILGDEVLPSIRIQPPGVFYDYDAKYLSDKTQYFCPSGLSDESEQQLAALALQAYHALDCSGWGRVDVMQDRDGHFYLLEVNTSPGMTSHSLVPMAARQYGLSFSQLVARILMLAD

SEQ ID NO: 77929 - protein, 275 aa, Yersinia pestis
MSQAALNARERAAEKNAARRSNGSQLAGVIFLLMVLGTILWGGWVVIGWMKDANRLPLSKLVVTGERHYTTNDDIRQAILALGAPGTFMTQDVNIIQQQIERLPWIQQASVRKQWPDELKIHLVEYVPFARWNDLHMIDEQGRSFSVPSERMGKQVLPLLYGPEGSERDVLEGYRAINKVLAANKYQLKMVAMSARHSWQLALDNDVRLELGRSDRMGRLQRFIELYPMLQQQPDKRVSYIDLRYDTGASVGWAPVFIDNQGGEPPINGQQNSNP

SEQ ID NO: 77930 - protein, 418 aa, Yersinia pestis
MIKSTDRKLVVGLEIGTAKVSALVGEVLPDGMVNIIGVGSCPSRGMDKGGVNDLESVVKCVQRAIDQAELMADCQISSVYLALSGKHISCQNEIGMVPISEEEVTQEDVENVVHTAKSVRVRDEHRILHVIPQEYAIDYQEGIKNPVGLSGVRMQAKVHLITCHNDMAKNIVKAVERCGLKVDQLIFAGLAASYAVLTEDERELGVCVVDIGGGTMDMAVYTGGALRHTKVIPYAGNVVTSDIAYAFGTPPTDAEAIKVRHGCALGSIVSKDESVEVPSVGGRPPRSLQRQTLAEVIEPRYTELLNLVNDEILQLQEQLRQQGVKHHLAAGIVLTGGAAQIDGLAECAQRVFHAQVRIGQPLNITGLTDYAQEPYYSTAVGLLHYGKESHLSGESEVEKRASVGNWFKRINSWLRKEF

SEQ ID NO: 77931 - protein, 383 aa, Yersinia pestis
MFEPMELTNDAVIKVIGVGGGGGNAVEHMVRERIEGVEFFAVNTDAQALRKTAVGQTIQIGSGITKGLGAGANPEVGRNSAEEDREALRAALDGADMVFIAAGMGGGTGTGAAPVVAEVAKELGILTVAVVTKPFNFEGKKRMAFAEQGIAELSKHVDSLITIPNDKLLKVLGRGISLLDAFGAANDVLKGAVQGIAELITRPGLMNVDFADVRTVMSEMGYAMMGSGVACGEDRAEEAAEMAISSPLLEDIDLSGARGVLVNITAGFDLRLDEFETVGNTIRAFASDNATVVIGTSLDPEMNDELRVTVVATGIGMDKRPEITLVTNKKTQPVMDHRYQQHGMSPLPQEVKPAAKVVNDTTAQTNKEPDYLDIPAFLRKQAD

SEQ ID NO: 77932 - protein, 311 aa, Yersinia pestis
MRDKMMIKQRTLKRIVQATGVGLHTGKKVTLTMRPAPANTGVIYRRTDLNPPVDFPADAKSVRDTMLCTCLVNEHDVRISTVEHLNAALAGLGIDNIIIEVNAPEVPIMDGSASPFVYLLLDAGIEELNSAKKFLRLKETVRVEDGDKWAELSPFNGFRLDFTIDFNHPAIDSSTQRYCLDFSADSFVRQISRARTFGFMRDIEYLQSRGLCLGGSFDCAIVVDDYRVLNEDGLRFEDEFVRHKMLDAIGDLFMCGHNIIGAFTAYKSGHALNNKLLQAVLAKQEAWEFVTFQDEAEMPLAFKAPSTVLAY

SEQ ID NO: 77933 - protein, 664 aa, Yersinia pestis
MTTELETSFADLGLSAPILSALTDLGYEKPSPIQLECIPHLLNGRDVLGMAQTGSGKTAAFGLPLLHNIKADLKSPQVLVLAPTRELAVQVAEALSSFSKHINGVNVVALYGGQRYDVQLRALRQGPQVVVGTPGRLLDHLKRGTLNLSNLSGLVLDEADEMLRMGFIEDVETIMAQIPAEHQTALFSATMPEAIRRITRRFMKEPQEVRIQSSVTTRPDISQSYWRVGGGYRKNEALVRFLEAEDFDAAIIFVRTKNATLEVAEALERSGYNSAALNGDMNQALREQTLERLKDGRLDILIATDVAARGLDVERISLVVNYDIPMDSESYVHRIGRTGRAGRAGRALLFVENRERRLLQNIERTMKLTIPEVELPNADLLSERRLAKFAAKVSQQLESSDLDMYRALLAKLQPEEEFDIETLAAALLKMAQGERPLILPPEAPRRPQREFNSRDDRGNDRGSRDRGDSRRDNRSDSRSADSRDGGERPARRERRDVGEMELYRIEVGRDDGVEVRHIVGAIANEGDISSRYIGNIKLFASHSTIELPKGMPGEMLSHFTRTRILNKPLNMQLLGDAQPHERRERPAGGNGGERRGGGRPFSGERREGAGAPPRRSFSGDRAPTGGGERRGNRDGQRSAAPRRDDAAAPAAAAAAPARRRFGDA

SEQ ID NO: 77934 - protein, 87 aa, Yersinia pestis
MACINVHCPRCDSALVYRHGQNPKGQSRFRCRECRSVFQLTYTYQARKPEVKGQIVDIAFSGTGVWDTARTLKIGINTVIRTLKNSC

SEQ ID NO: 77935 - protein, 705 aa, Yersinia pestis
MLTPIIRKFQYGQHTVTIETGMMARQATAAVMVSMDDTAVFVTVVGQKKAKPGQSFFPLTVNYQERTYAAGRIPGSFFRREGRPSEGETLTSRLIDRPIRPLFPDSFLNEVQVIATVVSVNPQINPDIVALIGASAALSLSGIPFNGPIGAARVGFINDQYVLNPTTDELKESRLDLVVAGTAGAVLMVESEADILSEEQMLGAVVFGHEQQQVVIENINALVAEAGKPKWDWQAEPVNEALHARVAELAEARLGDAYRITEKQERYTQVDAIKADVTEALLAQDDTLDAAEIQDILASVEKNVVRSRVLRGEPRIDGREKDMIRGLDVRTGILPRTHGSALFTRGETQALVTATLGTARDAQNIDELMGERTDSFLLHYNFPPYCVGETGMVGSPKRREIGHGRLAKRGVLAVMPSASEFPYTIRVVSEITESNGSSSMASVCGASLALMDAGVPIKAAVAGIAMGLVKEGDNFVVLSDILGDEDHLGDMDFKVAGSRDGVTALQMDIKIEGITREIMQVALNQAKGARLHILGVMEQAISTPRGDISEFAPRIYTMKINPEKIKDVIGKGGSVIRALTDETGTTIEIEDDGTIKIAATDGDKAKHAIRRIEEITAEIEVGRIYAGKVTRIVDFGAFVAIGGGKEGLVHISQIADKRVEKVTDYLQMGQDVPVKVMEVDRQGRIRLSIKEATTPDAEAPEAAAE

SEQ ID NO: 77936 - protein, 324 aa, Yersinia pestis
MGRPRRRGRDINGVLLLDKPLGLSSNDVLQKVKRLFSANRAGHTGALDPLATGMLPICLGEATKFSQFLLDSDKRYRVVARLGQRTDTSDAEGALISEREVNLTQAQIDTALESFRGESQQIPSMYSALKHQGKPLYEYARQGIEVEREARSITVYELLFIRWEGNDLELEIHCSKGTYIRTIIDDLGELLGCGAHVSYLRRLQVATYPSERMVTLEQLTAMVEAAQAEGRSPNPELDSLLLPMDSAVLNFPEVNLLPSVAAYVKQGQPVHVSGAPSEGMVRITEGKERNFIGIGTIAEDGRVAPKRLVVESVEVENLPVENKK

SEQ ID NO: 77937 - protein, 884 aa, Yersinia pestis
MTDVTVKSLAAEIQTPVDRLVQQFADAGIKKSDVDSVTQQEKEILLAHLNREHGSVPNKLTLQRKTRSTLNIPSTGGKSKSVQIEVRKKRTYVNTPEAEQAKAEEQAQREAEATAQKIAEEKAKREAEEQAKREAAEKAKRQAAEKEKVTNQQTDEKTKPAQTDKARREAEAAELKRSVEEETRRKVEEDAKRVAEEARKMAAENEGKWPEPVAEQTESADYHVTTSQHARAAEDENDAKVEGDRRSRTRGGKATKQKKGNKLSESKADREEARAVGRKGKRKPSTLQQSFNKPVVAVNRDVVIGETVTVAELANKMAVKGSQVIKAMMKLGAMATINQVIDQETAQLVAEEMGHKVILRRENELEEALMSDRDIGVEAAAEHRAPVVTIMGHVDHGKTSLLDYIRSTKVASGEAGGITQHIGAYHVETENGMITFLDTPGHAAFTSMRARGAQATDIVVLVVAADDGVMPQTIEAIQHAKAANVPVVVAVNKIDKPEADPDRVKTELSQYGIQPEEWGGESQFINVSAKAGIGIDELLNAILLQAEVLELKAVRTGMANGVVIESFLDKGRGPVATVLVQQGTLNKGDIVLCGFEYGRVRAMRDELGRDITSAGPSIPVEILGLSSVPAAGDEVTVVRDEKKAREVALYRQGKFREVKLARQQKSKLENMFANMTEGEVSELNIVIKSDVQGSCEAICDSLEKLSTDEVKVRIVGSGVGGITETDATLAAASGAIILGFNVRADASARRVVETEGLDLRYYSVIYSLIDEVKQAMSGMLAPEYKQQIIGLAEVRDVFKSPKFGAIAGCMVTEGVIKRNNPIRVLRDNVVIYEGELESLRRFKDDVSEVRNGMECGIGVKNYNDVRTGDVIEVFEIIEIKRTIA

SEQ ID NO: 77938 - protein, 495 aa, Yersinia pestis
MNKEILAVVEAVSNEKSLPREKIFEALETALATATKKKYEQEIEVRVSIDRKTGDFDTFRRWVAVDEVTMPTREITLDAAQFEDPSLQLGDYVEDQIESVTFDRITTQTAKQVIVQKVREAERAMVVEQFRQYLGQIVTGIVKKVSRDSIALDLGHNAEAVIGREDMLPRENFRPGDRIRGVLYDVRPEARGAQLFVSRSRSEMLVELFRIEVPEIGEELIEIKAAARDPGSRAKIAVKTNDKRIDPVGACVGMRGARVQAVSSELGGERIDIVLWDDNPAQFVINAMAPADVASIVVDEDKHTMDVAVEASNLAQAIGRNGQNVRLAAQLSGWELNVMTADDLQAKHQAEAHAAIDTFTKYLDIDEDFATVLVEEGFSSLEELAYVPMKELLEIDGLDEDTVEALRDRAKAALTTLALAQEESFGDQKPADDLLNLAGLERSMAFKLAARGVCTLEDLAEQGIDDLADIEGLSDEQAGELIMAARNICWFGDNA

SEQ ID NO: 77939 - protein, 446 aa, Yersinia pestis
MSNRKYFGTDGIRGKVGESPITPDFVLKLGWAAGKVLARHGSRKIIIGKDTRISGYMLESALEAGLAAAGLSALFTGPMPTPAVAYLTRTFRAEAGIVISASHNPFYDNGIKFFSIDGTKLPDDVEEAIEAEMEKPLTCVESAELGKANRIVDAAGRYIEFCKGTFPSELSLNELKIVVDCANGATYHIAPSVLRELGATVITIGCEPDGMNINEECGATDVRLLQERVLAEGAHVGLAFDGDGDRLMMVDHLGNKVDGDQILYIIAREGLRQGQLKGGAVGTLMSNMGLQLALKDLGIPFVRAKVGDRYVLEAMQEKGWRIGAENSGHVILLDKTTTGDGIVAGLQVLTAMVRNHMSLHDLCSGMKLLPQILVNVRFSGEHNPLKSDEVEEVTRQVEKELGGRGRVLLRKSGTEPLIRVMVEGDAEESLIAEMANRIADAVKAAG

SEQ ID NO: 77940 - protein, 277 aa, Yersinia pestis
MHLTARGLTLDLSRPQVMGILNVTPDSFSDGGCHNNLDQALQHAQRMLSAGATLIDIGGESTRPGAAEVSEQEELDRVVPVVEALAQRFDVWLSVDTSKAAVITESAHAGAHLINDIRSLQEPGALEAAAKTGLPVCLMHMQGQPKNMQHSPYYDDLMTDINRFFQHHIERCVAAGIAKNKLLLDPGFGFGKNLAHNYQLLAHLSELHHFELPLLVGMSRKSMVGQLLNVPPQQRVIGSVACAVIAAMQGAQIIRVHDVKETVEAMCIVEATRSAKG

SEQ ID NO: 77941 - protein, 788 aa, Yersinia pestis
MQQDSLKTRIKDNAFWGDAYQHLHVKMDTDWAFISQNMGPSLYKDFSLEGVFVIDGQGKTRYSVINGQLVNTDLQSWLHKDITPLIDIARQRAEKPYIAVDTLEIAGQPALIAAAALTPGEDPRVQWVAGPPSVLVFINILTPAELSALGENYGIHNLRMPRNSQDATSKPSLVIASSDNSTLTLHWDQEMPGTPLLNILLPLLALVALIIGLTAWLVIRRAISEAQATDRSRAALAASEERFRHVAESASDWLWETDAELQVTYLSPRFLIISGWSVDHWLGLNLDSLLNCDITSLRTWLQHTHLTDSRNELQCTYFSAKGSKRVCRIHAKPIIQQGEIVGFRGTASDLTREIEAEKRIEHLSLHDALTGLPNRTLMTEFLENKLHNLAAVEHPLVILNVNLDKFKPVNDIFGHVTGDQVLYQVAERLRSCLRDKDLVSRQGGDEFVLIISNLSSSYEIELLCARVITRLQTPYVINDQEIYLGASIGITLAPQDSMQAEELLRFADIAMCEAKNSPRNRWRFYASEMNDRLMQRIELEKFLRLAVKKSEFCLYYQPRYRTDDMQLIGAEALVRWNHPVLGLLMPDQFIALAEETGLITAISDWTLLQACQDAMTWPTSLIVSVNISAIEFRGQCLIERVRQALLVTGLPSHRLELEITERIMIEDADGALKIMTALKTLGIRLSIDDFGTGYSSLNYLHRFPFDGLKIDKSFIDKLTESHEGQSIVEGIINLGHAISMTVIAEGVETAEQLTYLQSLHCDEVQGYFLAKPMPVEALSLVFSEDLSV

SEQ ID NO: 77942 - protein, 1039 aa, Yersinia pestis
MLHFFIRRPKFAIVIALVITLVGWVSLYVIPVEQYPDITPPVVSVSAVYPGASARDVAQAVASPLEAQVNGVSHMLYMESTSANNGSYQLSITFASGTDPDMAAVEVQNRISQVSAQLPAEVNENGISVRKRASNLLLGVSVFSPQQTHDALFVSNYTSIQLRDAIARISGVGDVQVFGARDYSMRVWLDPQRMESLNVSVQDIVAALQQQNVQAAAGQIGSSPSMPNQQQTLTISGQGRLTDARQFADVIIRSNPQGGMIRLGDVARVALGAQNYQVSAAQNQTESAFLVVYPVPGANALNVANGVRDEMARLSAAFPADLTYEINYDSTLPVTATLHEIAVSLTLTLIVVLAVVYLFLQSLRATFIVALTVPVSLLGTFAVLYVFGYSANTLSLFAIILALTIVVDDAIVVVENVERLLSNDPHLSPAEATRQAMSQIAGPIIATTLVLMAVFVPIAILPGIIGELYRQFAVTLSAAVILSSINALTLSPALCAVLLKRRTLATTGMFGTINKGLDRARDGYVGLTGRINRRAVFSIAALLLVGLATWWGYSRLPTSFLPEEDQGYFFVSLQLPDGASLNRTQTVMDQMYQQVSTNEAVEDVIKITGFSLLSGNNAPNAGFAIVMLKPWGQRPHIDRVLASIQANLAAIPSAMIMAVNPPAIAGLGSASGFDLRIQALLGQSPQELAQVSQGIIFAANQDPTLSRVFTTFSASVPETNLSIDRDRAALLQVPVSRIFQTLQTSLGGMNAGDFTLNNRMFRVQLQNDMNFRQRTAQINNLNVRSDNGALVSLANLVTLTPSVGAPFISNFNQFPSVAISGSAADGASSGQAMAAMEALLAQNLPQGYSYSWSGMSWQEQQTGGQVVFIYLAALVFAYLFLVAQYESWSIPLVVVLSVVFAVGGAVAGLSAMGFANDVYAQIGLVLLIGLAAKNAILIVEFSKARREEGASIAEAAQDGAKQRFRAVMMTAISFILGVMPLVFASGAGAMSRQIIGITVFGGMLMATAVGILFIPALYLHIQRLREWTKNRKQDVDESL

SEQ ID NO: 77943 - protein, 496 aa, Yersinia pestis
MDIFSSFNLYNKELYSNSPTHPAFDKSKPYISELKSREEKNLNGEVNFKDNVDKLIMCRHLSSQYILDSLSDEDTGKVDLDKFSSKDIIANRITSNVEELYEQLQLQAKEIYFIPNNEFGICLSKIFKSMERKSENTQSILLESFNHAMAVRLRIKENENNNTKRYVISVYDPNMTNVTVRCEVDDLVKVRDFQVKDFINHHLFGNFYKSYNPTESSEISTLYICKKPANESVPECTGKKITFYDWIALPASSINLYTFLIEGFSQEIKNLKNQLEIIYKKNPEKLMEILTAKSTDGIMGFEQALLNDHADAINAFGELLQLVPENKRSELLVNNKKTKYTLFDIVCSREKNKTTMAFKNIVSLISKNERYKLIESKVNILDTVINSLITKKDSSHLNEIFELISLAPEEHVINLLSNIDITQSLEYSLYHNDTKSINIITKMLKGLSEQGRENIPFLRKLDESIVNMYIQLGKKIAVSAYRELLALKPGTLKESK

SEQ ID NO: 77944 - protein, 3705 aa, Yersinia pestis
MNTIFKVIWNASLNVWVVVSELAKGRIKTKSSRNLISEGVLPKFEQSMVSKLFRKNLLALSLGSIVFLSTGPVFAADITVSTQAELSAALSNGTYDKIILGADITLIGSLTVNMTSNQVVIDGQGKFGLTVNNTTNYGLVVSSGSGTLTLQNMSKIDSANYYSMVVLNGANTAVNVIYNNIDFLGSSQLIYMGAYGAATNSIMTFGDILNDVVVNDRAQEIGEVNKLAFTGRFHVTHTGSSVTSFVSTGGANNTSTMDFASGADVKIDRTGSTGDLTSTGVNAFAYTFADGASFELIANQNVFSGTTTNRGLEIGSYNSIDGFGSGVKIVLQSRSDGSIISGNGIDNATTNAAGINNNASGDANVIYNLGTGSILKATNTGILATKNANNASDIYIRSAGDITAATGISATHNGTGTVKIKNDGTITSTTAGIAISSASIKEISVDNTDGTITATAGTGVNVLASAILNLFGGTINTSATANGITFAGTEGGHTLTDLTINLLGTGIALSNVAGVNLTLSNVTLNTLNGTALNSLTGLTLVDSLNGRNTINIEGAGIGIAATNTELNTFDAEALDINVNGAGIGIQATGGGVNLSASNLIINVANTLGTALQITDGIDNTTTIGNEIQLNAENATAINFLGSSSKTLNNNGTIKGSVIFAGVADHIINNNGTLDGTLTTGAGNDTLVLDSSSQSNDVINLGDGNNSVTIQNGATVSSIITGNGNDTFTINGMSVGSTYLGSLDAGTGLNTLNFNASTDELAAATSLQGFTNINLVDSHITLVSDDNIGSGMVNIDSSSELLFGSTFDGILHATLGAGTGSAIVNNSANVSLEQASMFAGTWQVNQGGALTASNSNQLGSAKIGLDGTLNLDNIALFNHVLTGNGTLNVAKNLATTAFDFGSTVGGAFSGIVNLTKTTFALSADNAAALASATLKLSDDSVTTVGTTDRTLHGLDLSGGTLIFDGAVPQSQTSGVVTVTDLALNSGTVNITGSGSWDNTDPLATNVSILEQDRAGSTLELINATNVTGDIDALDLLVNGTAITSGTQGVQSAIQQGGSTVANAIHNYGLASSNSNGDSGLYVNYTLSALELLADGADALLLATESGLTANRVLNAELFGVGGLVVDAQNGALTLANGSNRYEGTTTVTAGELILGANGAFGQTSLLDIASGASANINGYSQTVGAVTNVGTVTLGSGGVLTSGLLTNGGILDLTGGALNLTAGGASTVAGGLTGAGTLNINGGNLSVSAANSGLSGQTHIADVASVTLTDTGTLGTSAVEVLGTLNLNGANAAMTNVLSGDGTINTNAAVTLSGNNSFSGAHQIGTDGELTVGQASNLGASSATVNLGTLTSHLILNGVSESIANVLSGVAGSTVDIIGGADTALTANNSGFLGQYALAGNSKLTVASTNNLGASSSVALAGAGDTLSLSGFNGTFGNSVTGSGVLQVTDDAEVTLTSSNGVSNAVTIDIADATLNLDDIALFNHVLTGNGLLNVAKNDASTAFDFGSTVGGAFSGIVNLTNTTFALSADNAAALARATLKLSDDSVTTVGATDRTLHGLDLNGGTLIFDGSPPQSQANGVVTVTDLALNSGTISITGAGNWENEHPVTPPNVSLLEQDRGDILLELINAANVTGNANNLDLLVDGTAITSGTQGVESAIQQGGSTVANAIHNYGLTSSNGNGGSGLYVNYTLSALELLANGANALLLATESGLTANRVLNAELFGVGGLVVDAQNGALTLANGNNRYEGTTTVTAGELILGANGAFGQTSLLNIASGASANINGYRQTVGAVTNSGAVTLGNGGVLTSGLLTNGGILDLTGGALNLAAGGSSTVAGGLTGAGTLNINGGDLAVSATNSGLSGQTHIADVASVTLTGTGTLGTSAVEVLGTLNLNGANAAMTNVLSGGGVINTNAAVTLSGNNSFSGAHQIGTDGELTVGQASNLGASSATVNLGTLTSHLILNGVSESIANVLSGVAGSTVDIIGGADTALTANNSGFLGQYALAGNSKLTVASTNNLGASSSVALAGAGDTLSLSGFNGTFGNSVTGSGVLQVTDDAEVTLTSSNGVGNTVKVDIADATLNLNDIALFDHVLTGNGTLNVAKNLATTAFDFGSTVGGAFSGIVNLTNTTFALSADNAAALARATLKLSDDSVTTVGTTDRILHGLDLNGGTLIFDGSPPQSQANGVVTVTDLALNSGTISITGAGNWENEHPVTPPNVSLLEQDRGDILLQLIDADNVTGNANDLELMINGTTISAGQGVQSTVQQGGYTVANATHNYGMTSNGGSGLYVNYTLSALELLADGANALLLATESGLTANRELNAELSGVGGLVVDAQNGALTLANGNNRYEGTTTVTAGELILGANGAFGQTSLLNIASGASANINGYRQTVGAVTNTGTVTLGNGGELTSTDTLINTGMINVTDGILNLENGGASSISGGLTGNGILNIKGGDFTISIDNNGLAGQTNISDGASVTLGNGGTIIGTGNLGSSVIDVLGDLNLVADNSLANVISGDGTINTTATVTLSGNSSFSGAHQIGTNGELTVGQASNLGASSATVNLGTLTSHLILNGVSESIANVLSGVAGSTVDIIGGADTALTANNSGFLGQYALAGNSKLTVASTNNLGASSSVALAGTGDTLSLSGFNGTFGNSVTGSGVLQVTDDAEVTLTSSNGVSNAVTIDIADATLNLDDIALFNHALTGNGLLNVAKNDASTAFDFGATVGGAFTGTVNLNNSTFDLSGNNTTVLAQATLKLSSGNLTSVGNGVQNIGTLAMNGGTLLFDNIVDNAGIITSDGTIAANSINTTGGGEVRVNLPSNLAPSLDGLSVMELDEGEIIVTLATGAATGTGHELTLTDENGDPISAVTYQGVHNAGSTSAAATGSFNYGMTTGEDYDGLYVNYGLTALELLSTGSEALVLTAILANNGTQSNDLSAQITGSGDLAFASANDGSTASLSNSTNSYTGTTWVSSGNLRLDADSALGQTSLLAMSTATHVDINGTQQVVGELATEGGSTLDLNDGKLTVTGGGQIDGALTGGGELVLSGGLLNVSYDNAGFTGSTDIANGAVAHLSQAQGLGNGTINNNGTLHLDNTIGTLFNALTGSDGEVLLSNNASVQLAGDNSGYSGLFTNQAGSILIANSAEHLGGSSIANSGALILDTGSVWELTNTISGTGTLVKRGSGTVKIEGDTVSAGLTTIEEGLLQLGSSAVTQTLSLEESLQERALLVSFASNMANLTSNVLITANGSLGGYGQVTGNVENYGNLIMPNALTGGDFGTFTIDGNYTGDEGMITFNTILAGDTSVTDRLVITGDTAGQSYVTVNNIGGVGARTFEGIKIIDVGGDSAGQFTLNGRAVGGAYEYFLYQGGASTPDDGNWYLRTEADDRRPEPASYTANLAAANNMFVTSLADRMGETLYTDVFTGEQKTTSLWLRNEGSHNRSRDDSGELKTQDNRYVMQLGGDVAQWSRNAQDLWRVGVMAGYANSSSSTVAQVAGYRSTGSVDGYSVGIYGSWLADNADDTGAYVDSWVQYSWFDNRVSGQDLATEKYDSKGFTASVEGGYAFKVGESVNQSYFIQPKAQVVWMGVKADDHTETNGTVISGDGNGNIQTRLGAKAFINPSDKAKVSGPAFKPFVEANWIHNTKDFGTTLDGVTVKQAGTANIAELKLGVDGQVNSQLNLWGNIGQQVGNKGYSETSVVLGVKYNF

SEQ ID NO: 77945 - protein, 518 aa, Yersinia pestis
MSDVKPQNDRQTGILNAIERIGNAMPDITMLFIYALGVCWALSFGLSFINFDYFHPLTGDQIKVTNMLAPVELVTFITTMVKNFINFPPLAITIVATLGIGIAEGSGFIQVMLKKMLNVTPQRILTPAVVFIGVVSHVASDSAYVILMPVAAMMFYASGRHPLAGIAAAFAGLAGGFSASYTPSIIDPIMQGFTQGAAHIIDPSYNVNVLCNYFLSFGSTFGVILVCWFITDKIVEPRLLKSMPLNSDLSGLQSNNELQKVTPQESKAFKRAGLVMLLMLIGLAAALYPENSLLRSPDGSLTRPDAPIMQAIVPLLFFMFAIPGLIYGFSSGTFKSTKDVTASMENITRSLVSFLVFSFFCAQFLYSFSHSNIGTLMAISGADFLRTLAMPAGFTILGVILLSCALDIIITSASSKWSILAPILVPMLMAVGISPELTQASFRVSSTVNISTPMFAFYPLIIMYCRQYCSKTGVGTLCAMMLPYTLGLTVVLTLMLYLFWGLDIPLGFQSGYTYPATQ

SEQ ID NO: 77946 - protein, 962 aa, Yersinia pestis
MHKQLARIVGIVFFLGLLAPSSWAAIPAWQPLAETIYKSEHDLRKYQAIKLSNGMTVLLVSDTQAPKSLAALALPVGSLEDPDNQLGLAHYLEHMVLMGSKHFPEPGSFSEFLKKHGGSHNASTASYRTAFYLEIENDALAPAVERLADAIAEPLLDPINADRERNAVNAELTMARSRDGMRMAQVNAETLNPAHPSARFSGGNLETLRDKPDGKLHDELVSFYHRYYSANLMVGVLYSNQSLEQLAQLAADTFGRIPNRDAKVPTITVPVVTPDQTGIIIHYVPAQPRKQIKVDFRIANNSADFRSKTDTYISYLISNRSKNTLSDWLQKQGLADAINAGADPMLDRNGGVFSITVSLTDKGLAQRDVVVAAIFDYINMLHKEGIKKSYFDEIAHVLNLDFRYPSITRDMDYIEWLVDMMLRVPVAHTLDAPYLADQYDPKAIASRLAEMTPENARIWFVSPEEPHNKVAYFVDAPYQVDKIGVQRMKEWQQLGQKIALSLPALNPYIPDNFTLIKADKNITRPQNVADQPGLRVFYMPSQYFADEPKADITVAFRNPHALNSARHQVLFALTDYLAGLSLDQLSYQASIGGISFSTAPNNGLYVNAGGFTQRMPQLLTSLVSGYASFTPTEEQLVQAKSWYREQLDVAEKGKAYELAIQPAKLLSNVPYSERSERRKLLDSISVQDVLTYRDDLLKQSAIEVLAVGNMTAEQVTELTESLKKQLNLIGTTWWVGEDVIIEKTQLANMERVGSSSDAALAAVYVPTGYTEIAGMARSALLGQIIQPWFYDQLRTEEQLGYAVFSFPMSVGHQWGIGFLLQSNSKEPNYLYQRYLAFYPQAEKRLREMKPDDFEQYKQGLVNQLLQRPQTLDEEAERYRKDFNLNNFAFDSREKMIAQVKQLTANELADFFQQAVIKPQGLALLSQVKGQGQAGGFAVPEGWTTYPTTSALQATLPQKVLAP

SEQ ID NO: 77947 - protein, 652 aa, Yersinia pestis
MMTLLAQAARDRLLRPLDVQFSRMIAGDDDPRLQLAAAILSAEVGAGHVCLPLRYLQPELLFGGRQPDLSLALWQAAGSPDKAQWLQALQNAPVVSDGSQPTPLVLQQERLYLQRMWQYEGDVVQFIASDSVFINRDSDFMTSKGIATSVDESLLRETLDALFGCAGSEVDWQKVAAAVAATRRISVISGGPGTGKTTTVAKLLTALIRLSQGQRLRIKLAAPTGKAAARLTESLGKAIRQFFLTDDERKLFPDQASTLHRLLGVQPNSQRLRYHRGNPLNLDVLVVDEASMVDLPMMARLIAALPAKAKVIFLGDRDQLASVEAGAVLGDICRFAELGYSEQRAQQLTQLTGYLLTNNALTSNVLTNKALANKAQPDETYSDSANVRDSLCLLRKSYRFDEKSGIGQLALAVNAGEYRQALSVLNSAYSDVERFPLADEEDYQVLLEACAVGYQHYLERVAALAPAAEVLAAFGRYQLLCALRSGPFGVSGLNERIEQVLHRKGFIIRPSGPSGRWYVGRPVMIELNDSALGLFNGDIGIALHDNEGELRVYFQLPDGNIKSVQPSRLPSHETAYAMTVHKSQGSEFEHTALVLPNTFMPVLTRELVYTAITRARQHLTLYCSDAVLSHAIRTPTLRLSGLVDRLNTLNRQ

SEQ ID NO: 77948 - protein, 416 aa, Yersinia pestis
MADSNHNSGRRRLLQGAAAAWMLSISRVGFAASSHIVAVRVWPSSTYTRVTLESNTPLKYRQFALTHPDRIVVDIEGVQLNSVLKEISRQVQSADPYLKQARVGQFDKNTVRLVLELKQSISPQLFTLKPFAEFRNRLVVDLYPAEGGTSAEDDPLLALLEDYNKGNVDRTLPPETPKAGKAGRDRPIIIMLDPGHGGEDPGAIGKNKTKEKDIVLQIARRLRALIQKEANMRVFMTRNEDVFIPLKVRVAKARKLRADLFISIHADAFTNRAASGSSVFALSTKGATSTAARFLAQTQNEADQIGGVSKSGDPYLDHTIIDLLQTATINDSLKFGKEVLSRMSKINKLHKNRVDQAGFAVLKAPDIPSILVETAFISNLEEERKLRTSRFQQQIAESIFAGIKAYFANGGAMARL

SEQ ID NO: 77949 - protein, 377 aa, Yersinia pestis
MFQLSTQDIHLAAQADNKNAAITQVAAALTQAGCVTAAYVDGMLAREQQTSTYLGNGIAIPHGTTDTRDQVLNTGVQVFQFPQGIEWGADQTAYIVIGIAARSDEHLALLRQLTHVLSDDAVAARLAKTTSAEELRSLLMGEQKTAEFHFDTSLIALDVAADNLITLQALNAGRLQQIGAVDARFVSDVITREPLNLGQGIWLSDSTEGNLVSAVTISRPATAFEHKGEKVALLLTLSVADDQPLTVLNYLSELLLAQKADALLNADAAALLALLTSEYVEQSKVLSAEFVIRNEHGLHARPGTILVNTIKQFTSEITVTNLDGTGKPANGRSLMKVVALGVKKGNRLRFTASGEDAQTALDTIGEVIAAGLGEGAA

SEQ ID NO: 77950 - protein, 312 aa, Yersinia pestis
MSRRVATITLNPAYDLVGFCPEIERGEVNLVKTAGLHAAGKGINVAKVLKDLGIDVTVGGFLGKDNQDGFQLLFSELGIANRFQVVPGRTRINVKLTEKDGEVTDFNFSGFEVTKPDWDRFVTDSLSWLGQFDMVAVSGSLPAGVNPDDFTDWMKRLRSQCPCIIFDSSREALVAGLKASPWLVKPNRRELEIWAGRPLPALGDVVEAAHALRDQGIAHVVISLGAEGALWVNASGAWLAKPPACDVVSTVGAGDSMVGGLIYGLLMRESSEHTLRLATAVAALAVSQSNVGITDRPQLAAMMAKVDLKPFN

SEQ ID NO: 77951 - protein, 566 aa, Yersinia pestis
MKTLLIIDSSLGQARGHLATLMLGAAAKKAGLSWVEKAADAELVIVAGSSAPADSTLNGKKVYVGDVEKAVRDPDGFLAQAIAQAAPYQAAATPEPTSVAGAKRSVAGPKRIVAITACPTGVAHTFMAAEAIESEAKKRGWWVKVETRGSVGAGNEITPEEVAAADLVIVAADIEVDLNKFAGKPMYRTTTGLALKKTVQELDKALVEADVYQPKTSSSVASKKTETGGPYRHLLTGVSYMLPMVVAGGLCIALSFVFGIEAFKEKGTLAAALMQIGGDSAFALMVPVLAGFIAFSIADRPGLTPGLIGGMLAVSTGAGFLGGIIAGFLAGYVAKAISTKLHLPQSMEALKPILIIPLVASLIVGLTMIYIVGTPVAKIMTGLTHWLESMGTANAVLLGAILGAMMCTDMGGPVNKAAYAFGVALLSSSVYAPMAAIMAAGMVPPLAMGLATLLARNKFDKGEQEGGKAALVLGLCFISEGAIPFAARDPMRVLPCCIAGGALTGALSMAFGAQLMAPHGGLFVLLIPGAIHPVLLYLVAIAAGTLLAGGLYAMLKRPDAMVAKVA

SEQ ID NO: 77952 - protein, 837 aa, Yersinia pestis
MKKLIVQFTTITLLMSTSFLVGAQRYSFDPNLLVDGNNNTDTSLFEQGNELPGTYLVDIILNGNKVDSTNVTFHSEKSPSGEPFLQSCLTKEQLSRYGVDVDAYPELSPALKNSQTNPCVNLAAIPQASEEFQFYNMQLVLSIPQAALRPEGEVPIERWDDGITAFLLNYMANISETQFRQNGGYRRSQYIQLYPGLNLGAWRVRNATNWSQSGDRGGKWQSAYTYATRGIYRLKSRVTLGESYTPGDFFDSIPFRGVMLGDDPNMQPSNQRDFIPVVRGIARSQAQVEIRQNGYLIYSTVVPPGPFELSDVIPSKSGSDLHVRVLESNGASQAFIVPYEVPAIALRKGHLRYNLVAGQYRPANADVETPPVAQATVAYGLPWNLTAFIGEQWSRHYQATSAGLGGLLGEYGALSSSITQATSQYHHQQPVKGQAWEVRYNKTLQASDTSFSLVNSQYSTNGFSTLSDVLQSYRQSGSGDNRDKIDENSRSRDLRNQISAVIGQSLGKFGYLNLNWSRQVYRGPIPAKNSLGIHYNLNVGNSFWALSWVQNANENKNDRILSLSVSIPLGGHHDTYASYRMTSSNGSNDHEIGMYGQAFDSRLSWSVRQAEHYGQPNSGHNSGSLRLGWQGSYGNIAGNYYYTPSIRQLSADVSGGAIIHRHGLTLGPQINGTSVLVEVPGVGGVTTTEDRRLKTDFRGYSIVSGLSPYQEHDIVLETADLPPDAEVAKTDTKVLPTEGAIVRASFSPQIGAKALMTITRANGQTIPFGAMASLVNQSANAAIVDEGGKAYLTGLPETGQLLVQWGKDAGQQCRVDYQLSPAEKGDTGLYMLSGVCH

SEQ ID NO: 77953 - protein, 285 aa, Yersinia pestis
MKFVGAHVSAAGGVDQAVIRAHELEATAFALFTKNQRQWRAAPLAEDVIEKFKLACEKYGYTSAQILPHDSYLINLGHPVTEALEKSREAFIDELVRCQQLGLSLLNFHPGSHLLQIDEDQCLARIAESINIALDATEGVTAVIENTAGQGSNLGFKFEHLAAIIERVEDKSRVGVCIDTCHAFAAGYDLRTEEDCEHTFAALGKIVGFQYLRGMHLNDAKSEFNSRVDRHHSLGEGNIGKTVFSYIMRDSRFDNIPLILETVNMDIWAEEIAWLKSQAEIEPSL

SEQ ID NO: 77954 - protein, 274 aa, Yersinia pestis
MQQLQNVIETAFERRADITPANVDTVTREAITHVIDLLDTGALRVAEKIDGQWVTHQWLKKAVLLSFRINDNQVMEGAETRYYDKVPMKFAGYDEARFQREGFRVVPPATVRKGAFIARNTVLMPSYVNIGAFVDEGTMVDTWATVGSCAQIGKNVHLSGGVGIGGVLEPLQANPTIIEDNCFVGARSEVVEGVIVEEGSVISMGVFIGQSTRIYDRETGEVHYGRVPAGSVVVSGNLPSKDGSYSLYCAVIVKKVDAKTRSKVGINELLRTID

SEQ ID NO: 77955 - protein, 912 aa, Yersinia pestis
MTSRHRRLFYGLRSSSGKHMSDNHTEHSLSLTLTPTISEQPALPSTYLDSDIHCPILKQRLDAFQRWQAEAFNSGTSAEVLIAARSDYIDHLLQRLWTFYGFDKVPETALVAVGGYGRGELHPLSDIDVLVLSKQRLNDEQAQRVGQLITLLWDLKLEVGHSVRTLEECLLEGLADLTIATNMIESRLICGDVALFLQMQKHIFSDSFWPSPQFFHAKVVEQQERHKRYHGTSYNLEPDIKSSPGGLRDIHTLLWVARRHFGATSLSEMVDFGFLTNAERNELNESQSFLWRIRFALHLVLTRYDNRLLFDRQLSVAQLLRYEGEGNEPVEHMMKDFYRMTRRVSELNNMLLQLFDEAILALDANEKPRPLDEEFQLRGDLIDLRDENLFVRQPEAIMRMFYLMVRNQDIKGIYSTTVRRLRHARRHLKAPLCHIPEARKLFMAILRHPGAVSRALLPMHRHSVLWAYMPQWGSIVGQMQFDLFHAYTVDEHTIRVLLKIESFADEDTRPRHPLCVELYPRLPQPELLLLAALFHDIAKGRGGDHSILGAHDAVEFAEQHGLNSRESQLVAWLVRCHLLMSVTAQRRDIQDPAVIQQFSAEVQSETRLRYLVSLTVADICATNENLWNSWKQSLLRELYFATEKQLRRGMQNSPDLRERVRHHRLQALALLRMDNIDEEALHRIWSRCRADYFLRHSPNQLAWHARHLLEHDSTKPLVLVSRQATRGGTEIFIWSPDRPSLFAAVVGELDRRNLSVHDAQIFTNRDGMAMDTFIVLEPDGSPLAQDRHPIISHALQQAINRSDYQHPPRVRRLSPKLRHFSVPTEANFLPTHNERRTYLELIALDQPGLLARVGKIFADLGLSLHSARITTIGERVEDLFVLADKDRRALSLETRRELAQRLADTLNPNDKL

SEQ ID NO: 77956 - protein, 274 aa, Yersinia pestis
MTKTPVSGLVRTALFAALASAFSLSAQAAEALRVAADPVPHAEILQFVQKLDPSLNLTIIEIPNGVNSNELLAHGDVDANYFQHLPYLHSQEQALGQKFVVAATVHIEPLGIYSHKYKNVAEVPDKGSVAVPNNVTNLSRALYLLQEQGLITLKPGFTDPAKQQATPKDIAENPKHLKILEIESPQIPRSLDDVDLAVINGNYALEAGLNPATDALGLEKAEGNPYANILVTTPTLENDPRIKQLAKDLQLQEVAKFITEKYAGSVIPVAGTQP

SEQ ID NO: 77957 - protein, 241 aa, Yersinia pestis
MATVSMRDMLQAGVHFGHQTRYWNPKMKPFIFGARNKVHIINLEKTVPMFNEALAELTKISSRKGKILFVGTKRAASEAVKEAANNCDQFFVNHRWLGGMLTNWKTVRQSIKRLKDLEIQSQDGTFDKLTKKEALMRTRELNKLENSLGGIKDMGGLPDALFVVDADHEHIAIKEANNLGIPVFSIVDTNSDPDGVDFIIPGNDDAIRAVKLYLGAVATAVREGRSQDLAVQAEESFVEAE

SEQ ID NO: 77958 - protein, 285 aa, Yersinia pestis
MVAITAALVKELRERTAAGMMECKKALVEANGDIELAIDNMRKSGQAKAAKKAGRIAAEGIILAKVSADGKYGVILELNCETDFVAKDAGFKAFGEEVINAALAEKIADIDVLKAKFEEQRANLVAKIGENINIRRVAVLEGDILGTYLHGARIGVMVAATGADEELVKHIAMHIAASKPEYVKPDDVPAEVVAREHQIQLDIAIESGKPREIAEKMVEGRMRKFTGEVSLTGQNFVMDPSKTVGDLLKENNADVVNFIRFEVGEGIEKVETDFAAEVAAMSKQS

SEQ ID NO: 77959 - protein, 241 aa, Yersinia pestis
MATNAKPVYQRILLKLSGEALQGAEGFGIDASVLDRMAQEVKELVELGIQVGVVIGGGNLFRGAGLAQAGMNRVVGDHMGMLATVMNGLAMRDALHRAYVNARLMSAIPLNGVCDNYSWAEAISLLRHNRVVIFAAGTGNPFFTTDSAACLRGIEIEADVVLKATKVDGVYSADPVKNPDATLYEQLTYQDVLEQELKVMDLAAFTLARDHNLPIRVFNMNKPGALRRVVMGENEGTLIAK

SEQ ID NO: 77960 - protein, 185 aa, Yersinia pestis
MINEIRKDAEVRMEKCLEAFQNHISKIRTGRASPSILDGIQVEYYGTATPLRQLANIVVEDSRTLALTVFDRSLSAAVEKAIMTSDLGLNPSSAGTVIRVPLPALTEERRKDLIKVVRAEAEQGRVSIRNVRRDANDKVKALLKDKEISEDEDRRSQDDVQKLTDAYIKKVDAALAVKEAELMDF

SEQ ID NO: 77961 - protein, 252 aa, Yersinia pestis
MSPVKEDRANLSPRSPRHVAIIMDGNGRWAKNKGKLRVFGHKAGVKSVRRAVSFAAKHNLDALTLYAFSSENWNRPDQEVTALMELFVRALDSEVKSLHKHNVRLSIIGDISRFSGRLQERIRRSEKLTANNDGLKLNIAANYGGRWDIIQGVRHLAEQVQKGELQPTDISEESLNSYICLHEQSQVDLVIRTGGEHRISNFLLWQIAYAELYFTDVLWPDFDENVFEGALNAFAQRERRFGGTTPIDATAS

SEQ ID NO: 77962 - protein, 433 aa, Yersinia pestis
MDTTQTSTLASARKISSSTWRKSDTMWMLGLYGTAIGAGVLFLPINAGIGGLLPLIVMAIIAFPMTYYAHRGLCRFVLSGKNPGEDITEVVEEHFGVGAGKLITLLYFFAIYPILLVYSVAITNTVDSFITHQIHLPSPPRAILSLILIVGLMAIVRFGEQTIVKAMSILVFPFVAVLMMLAIYLIPNWSGAIFENVSMDGNGTGSGLWMTMWLIIPVMVFSFNHSPIISAFAVAKREEYGVDAEKKCSRILSFAHIMMVITVMFFVFSCVLSLSPADLMDAKNQNISILSYLANHFNTPVIAYMAPVIAFIAITKSFLGHYLGAREGFNGMVIKSLRSRGKTIEQNKLNRITALFMLVTTWAVATLNPSILGMIETLGGPIIAMLLFLMPMYAIHKVPAMRKYSGQISNVFVVLMGLIAISGILFNLSNLFN

SEQ ID NO: 77963 - protein, 282 aa, Yersinia pestis
MLKYRLITALILIPVVIGALFLLPPVGFAIVTLVVCMLAAWEWGQLAGFASRTQRIWLAILCGFLLVAMLLSLPEYQHSPHHLLVSTPLWLSMGWWVAALMLVLTYPRSAVSWRNSRLLRIIFGILTIIPFFWGMFALRQYGYEQNHNTGAWWLLYVMLLVWGADSGAYMFGKLFGKHKLAPKVSPGKTWEGLIGGLLTSALISLLFGRYAPLDIVPEKLLICSVVAALASVLGDLTESMFKREAGIKDSGHLIPGHGGILDRIDSLTAAVPVFACLMLLVF

SEQ ID NO: 77964 - protein, 223 aa, Yersinia pestis
MTTNYAHYIDHTLLAMDATEAQIIKLCEEAKQHHFYAVCVNSGYVPVAAQQLAGSSVKVCSVIGFPLGAGLTAAKAFEAQAAINAGAQEIDMVINVGWLKSGKIADVKADIKAVRDNCAATPLKVILETCLLSDEQIVQVCEMCRELDVAFVKTSTGFSTGGAKEEHVKLMRATVGPVMGVKASGAVRDRATAETMIQAGATRIGTSSGVAIVSGQQAAASGY

SEQ ID NO: 77965 - protein, 198 aa, Yersinia pestis
MNYFFFSMINATPASSPWMISFATFIARDLIMLIPILLIGLWLWGPKDTMDMQRTVVTKAAIALAFSMLSATCIGMLIPHDRPFVDGFGYAFMSHAPDSSFPSDHGTAIFTFALAFLFWHHLWSGVSLMFIAIAIAWSRIYLGVHWPFDMLGAFLLGIVGCLFAQLVWNLFGEIIASTTKRFYHMSFALPISKGWVRG

SEQ ID NO: 77966 - protein, 340 aa, Yersinia pestis
MPSIRLADLAQQLDAQVHGDGDLVITGIASMHSAQPEQITFLSNSRYREQLASCNAGAVVLTEADLPFCKVAALVVENPYFTYARMAQIMDTTPQPAQDIAPSAVISPQATLGEGVSVGANAVIESGVVLGDNVVIGAGCFIGKNTHIGAGSRLWANVSIYHEVVIGQNCLIQSGTVIGADGFGYANDRGNWVKIPQLGSVHIGDRVEIGACTTIDRGALDNTIIGNGVIIDNQCQIAHNVVIGDNTAVAGGVIMAGSLKVGRYCMIGGASVINGHMEICDKVTITGMGMVMRPITEPGLYSSGIPLQPNKMWRKTAALVMNIDGINKRLKAVERKIDKE

SEQ ID NO: 77967 - protein, 181 aa, Yersinia pestis
MTTDTHTLHIEEILDLLPHRFPFLLVDRVLDFEEGKFLRAVKNVSFNEPFFQGHFPGKPIFPGVLILEAMAQATGILAFKSRGKLEPGELYYFAGIDEARFKRPVVPGDQMIMEVEFVKERRGLTRFTGVAKVDGEIVCTATMMCARSKPAAPAESVVVKPDVVKPDVVKPDVVNPVVKES

SEQ ID NO: 77968 - protein, 394 aa, Yersinia pestis
MQNSPLTADCSLNAGRPLTIGLVAGETSGDILGAGLIRALKVQVPNARFVGVAGPLMQAEGCEAWYEMEELAVMGVVEVLERLPRLLKIRKDLTQRFSELSPDVFVGIDAPDFNITLEGRLKQRGIRTIHYVSPSVWAWRQKRVFKIGKATDMVLAFLPFEKAFYDRFNVPCRFIGHTMADAMPLVPDQQAARAELGIAPNATCLALLPGSRHSEVEMLSADFLRTAVILRDKLPNLEVVVPLVNSKRREQFERIKAEIAPDLSVHLLDGKARVAMIASDAALLASGTAALECMLAKCPMVVGYRMKPFTFWLAERLVKTPYVSLPNLLAGEELVTELLQQECQPQKLAGALLPLLQGGSEIAALKERFLVLHQSIRCGADEQAAQAVLELADR

SEQ ID NO: 77969 - protein, 198 aa, Yersinia pestis
MSETFIYPQANLIAGVDEVGRGPLVGAVVTAAVILDPNRPIVGLADSKKLSEKRRLSLYDEITEKALSWSLGRAEPEEIDQLNILHATMLAMQRAVSGLHIVPDYVLIDGNRCPKLQMPSLAVVKGDSRVAEISAASILAKVTRDREMTELDLLFPEYGFAQHKGYPTAFHLEKLAALGATVHHRRSFGPVKRVLGLV

SEQ ID NO: 77970 - protein, 1171 aa, Yersinia pestis
MIQSTHFWYLDMAEPRFVHLRVHSDYSMIDGLAKIGPLVKRAAALGMPALAITDFTNLCGLVKFYGSAHGAGIKPIIGADFYVQSEILGDELAHLTVLARNNEGYQNLTLLISEAYQRGYGAAGPIIDRDWLIKHKEGLILLSGGRMGDVGKFLLRGNQVQVDQCLAFYQEHFPDCYYLELIRTGRPDEENYLHAAVALATERGLPVVATNDVRFIDESDFDAHEIRVAIHDGFTLVDPKRPKNYSPQQFMRDEEQMCELFADIPEALINSVEIAKRCNVTIRLGEYFLPQFPTGEMSTEDFLVEKAKQGLEERLEFLFPDPEVRLQKRPEYDERLDIELKVINQMGFPGYFLIVMEFIQWSKDNGVPVGPGRGSGAGSLVAYALKITDIDPLEFDLLFERFLNPERVSMPDFDVDFCMEKRDLVIEHVAEMYGRDAVSQIITFGTMAAKAVIRDVGRVLGHPYGFVDRISKLIPLDPGMTLEKAFAAEPQLAEIYEADEEVRALIDMARKLEGVTRNAGKHAGGVVIAPTKITDFAPLYCDAEGNNPVTQFDKNDVEYAGLVKFDFLGLRTLTIINWALEMINARRAKTGLEPIDIASIPLEDKKSFDMLQRSETTAVFQLESRGMKDLIKRLKPDCFEDMIALVALFRPGPLQSGMVDNFIDRKHGREAISYPDIEWQHESLKPVLEPTYGIILYQEQVMQIAQVLSGYSLGGADMLRRAMGKKNPAEMAKQRSVFEDGAKNQGIDGELAIKIFDLVEKFAGYGFNKSHSAAYALVSYQTLWLKAHYPAEFMAAVMTADMDNTDKVVGLVDECWRMGLKILPPDINSGLYHFHVNDDGEIVYGIGAIKGVGEGPIEAILEARKEGGYFKELFDLCARVDTKKLNKRILEKLIMSGAFDRLGPHRAALMSSLGDALKAADQHAKAEAIGQVDMFGVLADAPEQVEQSYANVPPWQEQVVLDGERETLGLYLTGHPITQYLKEIERYAGGMRLKDMHPTDRGKMTTAVGLVIAARVMVTKRGNRIGICTLDDRSGRLEVMLFTDALEKYQHLLEKDRILIATGQVSFDDFSGGLKMTARELMDISEAREKYASGLAISLTDRQIDDQLLNRLRQSLEPHRAGTIPVHLYYQREDARARLRFGATWRVTPTDRLLIDLRTLVGNEQVELEFD

SEQ ID NO: 77971 - protein, 319 aa, Yersinia pestis
MSLNFLDFEQPIAELEAKIDSLTAVSRQDEKLDINLDEEVQRLREKSVELTRKIFSDLGAWQIAQLARHPRRPYTLDYIANIFTDFEELAGDRAYADDKAIVGGIARLDGRPVMIIGHQKGRETKEKIRRNFGMPAPEGYRKALRLMEMAERFKLPIITFIDTPGAYPGVGAEERGQSEAIARNLREMSRLNVPIVCTVIGEGGSGGALAIGVGDKVNMLQYSTYSVISPEGCASILWKSADKAPLAAEAMGITAHRLKELKMIDSVIPEPLGGAHRDYAAIAISLKAQLLADLNDLDVLNDEELLNRRYQRLMNYGYC

SEQ ID NO: 77972 - protein, 281 aa, Yersinia pestis
MNNLPEVRSVWRRVILTVGYTFLYAPMLMLVIYSFNSSKLVTVWAGWSTRWYTQLFNDSAMISAVGLSLTIAAASATMAVVLGTIAAVVMVRFGRFRGSTGFAFMLTAPLVMPDVITGLSLLLLFVAMGHAIGWPAERGMFTIWLAHVTFCTAYVTVVISSRLRELDRSIEEAAMDLGATPLKVFFVITVPMIAPALISGWLLAFTLSLDDLVIASFVAGPGATTLPMLVFSSVRMGVNPEINALATLILLVVGVIGLFAWWIMSRAEKQRLRELRKAARS

SEQ ID NO: 77973 - protein, 460 aa, Yersinia pestis
MNLVTSKPNVLLNPLFAQLGENRHVLVGFSGGLDSTVLLHLLVCLRQQLIPELNIRAIHIHHGLNPQADSWVKHCMQQCDQWKIELKVVRVNIDPRQNGIEAAARTARYQAFSANLAAKEVLLTAQHLDDQCETFLLALKRGSGPAGLSAMAAKMPFAHSQLLRPLLAFSREILENYAQAQQLQWIEDDSNQDDRFDRNFLRLNVLPILNQRWPHFAQATARSAGLCAEQEQLLDELLAENLQQLQGPDRSLSIDGLLQASMAKRAAILRRWLASLGAPMPSQSQLQRLWLEVAMARQDAEPQLMIGTRQVRRFRQHLYLLMPLAEITTNYLPWATVKAAPNSSIIPLLPEPLWLPADLGVLRFVSAGGQAVRPAAVGEEISVRFGLQGDIKIVGRHHSRQSKKVWQELGIPPWQRERIPLLYFGEQLIAAAGVFVTQAGQANENEPCWHLDWDKPLRLG

SEQ ID NO: 77974 - protein, 262 aa, Yersinia pestis
MMKADVLAQLAGLQQEISQLHDNAQQNQSHFVLLERRFSRLQSFNDEPQLQDYRLQLEHDDAVVKQIAQLRQVANAALCDYEKHQVCALCSPSSKTDDYLTSFNQSLQQEIKLAGMQMGEKVLLVGSGALPTTALVLVAKLGATVFCYDHDPAAQQLARQLVQSLGLEKQVQFIDNLKELTDRPVDHIIVASLVADKQALLAQLVPYVTRSSKLVMRYGNGLKSIFNCPYCHEVNCSHWRTASKPVTTGLYDLIILEPNHHA

SEQ ID NO: 77975 - protein, 456 aa, Yersinia pestis
MHNTLPTLILGAGPAAIQLAVDISATGDARLGLYNRPSTKGERLKQYLALTPTLYLQGTGKAQATQKESSVTIDCYIDQLAQAVGDWQRLILAVPADHYYAVLQQIPWAALPQLKSVILLSSSMGSGLMVQNLLNAAGKRDVEVISLSSYYADTKYIRAETQDISANTQDINAGTQDIGAIQPYRAYTKAFKQRIYLANQWGNAGSAEMSWLTAVLARHHIDTLPCSNLLAAERFSITNYVHPPLALADTTLQALFYPEQRSQYLYKTQPEGPVCPAVIADLAGLADDYKRLLNRLGVEEINLLRFLNDDNYPVPASMVSRRWIDEFPQLPPLEQQYALFVRYTALLVDPYSTPDEQGRFYDFSAVKVATVYQDANALWHLPRVPLEDVHKLRTLLLLAGALDVVMPTAQRLLQRFQQALKAFIDRVGEEHCHPSLLGDDCDRQAAIIEQQWRSQT

SEQ ID NO: 77976 - protein, 238 aa, Yersinia pestis
MNEFQPLASAAGMTVGLAVCALALGLVLAMLFAVGESSRLKVVSYLTIGWVTLLRGLPEILVVLFIYFGSSQLLMMLSDGFTLNLYLFELPIKLNLDNFEVSPFLCGVIALALLYSAYASQTLRGALKAVPIGQWESGQALGLSQTAIFFRLIMPQMWRHALPGLGNQWLVLLKDTALVSLISVNDLMLQTKSIATRTQEPFTWYVIAAAIYLVVTLLSQYVLKWIELRTTRFERSAS

SEQ ID NO: 77977 - protein, 321 aa, Yersinia pestis
MSKPIQMERGVKYRDADKMALIPVKNVVTERQELLRKPEWLKIKLPTDSSRIQGIKAAMRKNGLHSVCEEASCPNLSECFNHGTATFMILGAICTRRCPFCDVAHGRPVTPDANEPEKLAQTIQDMGLRYVVITSVDRDDLRDGGAQHFADCISAIRAKNPTIKIETLVPDFRGRMDRALDILTATPPDVFNHNLENVPRVYRQVRPGANYDWSLKLLERFKEAHPDIPTKSGLMVGLGETNAEIVEVMHDLRRHGVTMLTLGQYLQPSRHHLPVQRYVSPAEFDEMKAEAMAMGFTHAACGPFVRSSYHADLQAKGMEVK

SEQ ID NO: 77978 - protein, 335 aa, Yersinia pestis
MKVLVTGATSGLGRNAVEYLRRQEISVIATGRNQAMGALLTKLGAKFIHADLTDLVSSQAKAMLADVDTLWHCSSFTSPWGTEQAFALANVRATRRLGEWAAAYGVENFIHISSPAIYFDYHHHRNIQEDFRPVRFANEFARSKAAGEEVIKLLALSNPQTHFTILRPQGLFGPHDKVMLPRLLHMIKHYGTLLLPRGGDALVDMTYLENAVHAMWLATQSQKTLSGRAYNITNQQPRPLRTIVQQLLDALDMKCRIRSVPYPMMDIMARAMEKMSNKAEKEPVLTHYAVAKLNFDLTLDTLRAEQELGYRPIISLDEGILRTARWLKEHGKFRG

SEQ ID NO: 77979 - protein, 573 aa, Yersinia pestis
MKQTVATLIAKTLEQAGVKRIWGVTGDSLNGLSDSLHRMGTIEWLGTRHEEVAAFAAGAEAQLTGQLAVCAGSCGPGNLHLINGLFDCHRNHVPVLAIAAHIPSSEIGSGYFQETHPQELFRECSHYCELVSNPEQLPRVLEIAMRQAILNRGVSVIVLPGDVALQPAPEDAAVIWQTPKLPLVQPPMSELTLLADTLNKAKNITLMCGSGCADAHDEVVKLAERLQAPVVHALRGKEHIEWDNPYSVGMTGLIGFSSGYQAMLNADTLILLGTQFPYRAFYPTHANIIQIDINPGSLGAHCPVNMALVGDIKTTLTALLPQLDAKSDRAFLDKALEHYRTTRQDLDALATANDNQPIHPQYLAQQISHYATEDAIFTCDVGTPTVWAARYLQMNGKRRLLGSFNHGSMANAMPQAIGAQATAPDRQVVALCGDGGFTMLMGDFLSLTQLKLPVKIVVFNNSVLGFVAMEMKAGGYLTDGTDLHNPDFAAIANAAGIKGIRVEKASELNAALESAFAHPGPVLVDVVTAKQELSMPPQIKFEQAKGFSLYMLRAIINGRGDEVIELAKTNWLR

SEQ ID NO: 77980 - protein, 340 aa, Yersinia pestis
MTDFIPTDSPTPFCPNRMQVHSIVQETPDVWSLRLINHDFYSYLPGQYALVSIRNSDETLRAYTLSSTPGLSPFIQLTVRCLPDGEGSRWLTQQVNVGDYLWLSDAQGEFTCANADDDHYLMLAAGCGVTPVISMCRALLAQRPQADIRVIFNVRTPADVIFANEWHTLLQRYPQQLKLTLMAESAATAGFIEGRINARIMQQVAPDIAHRRVMTCGPAPYMAWVEQYCQQQQVPADHFQQEQFRTADEVIDTSNELTMTISRPLRSVNVPVGTSLLFALEQHKIPVMAACRAGVCGSCKTHILHGKYTTTSTMTLTPEEIAQGYVLACSCQLQGDVQLA

SEQ ID NO: 77981 - protein, 156 aa, Yersinia pestis
MKLQLVAVGTKMPDWVQTGFIEYLRRFPKDMPFELAEIPAGKRGKNADIKRILEKEGELMLAAVGKNNRIVTLDIPGTPWETPQLAQQLERWKQDGRDVSLLIGGPEGLAPACKAAAEQSWSLSPLTLPHPLVRVLVAESLYRAWSITTNHPYHRE

SEQ ID NO: 77982 - protein, 298 aa, Yersinia pestis
MYSGLLIILLPLIIGYLIPLSRKTLIQWINRSLSWMVYVILFFMGISLAFLENLSANLLLIFQYTSLFFLCILCANLLALFLLERKIPWKHTHRQEILPSRLHMALESLKLCGVVIVGFLLGLSQWEWLQFAAKGSELALIFLLFLVGIQLRNSGMTLRQIVLNRRGTLVAFVVALSALVGGIIAAALLGLPIKTGLAMASGFGWYSLSGILLTDAFGPVIGSAAFFNDLARELVAIMLIPTLVRSSRSTALGLCGATSMDFTLPVLQRSGGLEMVPAAIVHGFLLSLLAPILMAFFS

SEQ ID NO: 77983 - protein, 555 aa, Yersinia pestis
MYLERVEIVGFRGINRISLNLDDNTLLIGENAWGKSSLLDALTLLLSPEPQLYHFTVQDFYYPTGDESAKERHLQVILTFCEKDIGHWHAPRYRQLAPLWIKNNDGLHRIYYRVEGELGDDGTVCTWRTFLNLDGQPLPLHDIEKLARGVIRIHPVLRLRDARFIRRLRRTVSEDSKAPDKVALNRQLDQLSRELVRNPQKLTNAELRQGVEAMRQLLEHYFAEQGSQLPGHHNNPPRPQPERAAWQALDNINRMAAEPNSRSMRLILLGMFSTLLQAKGSLSLDPHARPLLLVEDPETRLHPIMLSVAWGLLSQLPLQRITTTNSGELVSLVPLESICRLVRESSRVATYRIGPRGMSPEDSRRIAFHIRFNRPSALFARCWLLVEGETEIWLLNELARQCGYHFEAEGVKVIEFAQSGLRPLLKFANRMGIQWHTLTDGDDAGKKYAATVRNMADQGRDSERDRLTILPAPDMEHFLYRAGFDEVYHRVSAIPANAKMQPRRVIDKAIHRTSKPDLAIEVASQAGQWGVESIPPLLKKMFSRVVWLARGRADE

SEQ ID NO: 77984 - protein, 860 aa, Yersinia pestis
MQEQYRPEDIETQVQLHWQEKQTFKVTEDASKEKYYCLSMLPYPSGRLHMGHVRNYTIGDVISRYQRMLGKNVLQPIGWDAFGLPAEGAAVKNNTAPAPWTYDNIEYMKNQLKLLGFGYDWDREIATCKPDYYRWEQWFFTKLYEKGMVYKKTSAVNWCPHDLTVLANEQVIDGCCWRCDTKVERKEIPQWFIKITDYAEQLLNDLDTLESWPEQVKTMQRNWIGRSEGVDIVFDVVDSEEKLSVYTTRPDTFMGVTYVAVAAGHPLSLQAAATNPALADFVAECRNTKVAEAEMATMEKKGMATGLYAIHPLTGEKLPIWAANFVLMDYGTGAVMAVPGHDARDWEFATKYNLPIKPVILAADGSEPDLSQEAMTEKGTLFNSGEFDGLNHEDGFNAIADKLVALGVGQRKVNYRLRDWGVSRQRYWGAPIPMVTLEDGTVVPTPEDQLPVILPEDVVMDGISSPIKADPEWAKTTVNGIPGLRETDTFDTFMESSWYYARYTCPQYDDGMLDPAAANYWLPVDQYVGGIEHAIMHLMYFRFFHKLLRDAGLVDSDEPAKRLLCQGMVLADAFYYTGNNGERIWVSPVDAIVERDDKGRIVKAVDAEGHELVYAGMSKMSKSKNNGIDPQVMVEKYGADTVRLFMMFASPAEMTLEWQESGVEGANRFLKRVWRLAFDHTAKGAVKPLDIASLTEEQKSLRRDLHKTIAKVTDDVGRRQTFNTAIAAVMELMNKLGRAPQETEQDRALMQEALLAVVRMLYPFTPHVCFSLWQALGGEGDIDTAPWPIADEQAMVEDSKLVVVQVNGKVRGRITVPADATEQQVRERAGQEHLVAKYLDGVTVRKVIYVPGKLLNLVVG

SEQ ID NO: 77985 - protein, 305 aa, Yersinia pestis
MQMRKLALVLLLAGMTSSVAQAEDATAKADTAIDTLQKVKNNGVIVVGHRESSVPFSYYDNQQKVVGYSQDYSNLIVDAIRKELNAPNLEVKLIPITSQNRIPLLQNGTFDFECGSTTNNLERQQQAAFSNTIFVVGTRLLTKKDSEVKDFKDLAGKAVVVTSGTTSEVLLNKLNEKDNMNMRIISAKDHGDSFRTLESGRAVAFMMDDALLAGERAKAKKPDEWSIVGTPQSEEAYGCMMRKNDPAFKALLDKTIATAQTTGVAEKSFDRWFKNPIPPKNLNMNFALSDEMKALFKAPNDKALN

SEQ ID NO: 77986 - protein, 515 aa, Yersinia pestis
MSIALFLQRQWVRALLALFFGACGTLAYSPFDHWPAAIVSLFGLLSLTLNRTTKQATFIGFCWGMGLFGSGINWVYVSISEFGGMPTAINIVLVILLAAYLSLYTMLFAGLLARLCPKATWWRLAIAAPVLWQLTEFLRGWVLTGFPWLQFGYSQINGPLRGIAPLLGVDGITFILMAISGLLVYACYQRRIVAAIIALALLLLPWPLRQIQWFTPEPERAVNIAMVQGNIAQSMKWDPKALITTLQIYLDETRPFMGKAPIIIWPESAIPDIETDQNTFLTMIDGLMRANHSSLITGIVDAKRQPEGQGYQFFNSIIVLGDKDTYQYPTRNRYSKHHLVPFGEYVPLESLLRPLAPLFNLPMSSFNRGDYVQPPLTIAGFNLTAAICYEIVLGQQVRDNFRPETDFLLTISNDAWFGHSIGPWQHFQMARMRALELGRPLLRSTNNGITAAIGPSGEILAQIPQFTQQVLEVKVTPTTGITPYARFGSWPMWIITLVLGAFTLYCAIRGRSDKH

SEQ ID NO: 77987 - protein, 292 aa, Yersinia pestis
MSDDHSQNSDSPSPKKGFFTLILNQLFHGEPKNRGDLVELIRDSEQNDLIDPDTRDMLEGVMDIAEQRVRDIMIPRSQMVTLKRNQTLDECLDVIIESAHSRFPVISEDKDHIEGILMAKDLLPFMRTDSEPFSIDKVLRTAIVVPESKRVDRMLKEFRSQRYHMAIVIDEFGGVSGLVTIEDILELIVGEIEDEYDDEEDRDVRQLSRHTYTIRALTQIEDFNEVFNTHFSDDEVDTIGGLVMQAFGHLPARGETIEIEGYLFKVAMADSRRIIQVHVKIPDDAPQPKLEE

SEQ ID NO: 77988 - protein, 393 aa, Yersinia pestis
MNKSQPNYDVVVVGGGMVGAAAALGLAQIGWSVALLEHDAPAPFDKDSVPDLRVSALGCTSVALLKQLGAWPQVQQMRYAPYRRLETWEQPGSQVVFDAASLSLPELGFMVENRILQLALWQQFAECPNLTLLCPSRLQSMVRIDDYWKVTLNEQEEIQGRLVIGADGANSLVRRLAGIGTSGWQYRQSCMLITVETDVMQQDTTWQQFFPTGPRAFLPLFDHWASLVWYDSPQRIRQLQAMSMAQLSQEIAAFFPSRLGAVKAIAAGAFPLVRRHAQQYVKPGLVLLGDAAHTINPLAGQGVNLGYRDVDALLEVLSQARELAEPWHSEQVLLRYQRRRRTDNLMMQSGMDLFYTAFSNDLPAVKFARNLALMVAQRAGKLKEHALRYALGL

SEQ ID NO: 77989 - protein, 1305 aa, Yersinia pestis
MSQEYTEDKEVTLKKLSNGRRLLEAVLIVVTILAAYLMVALVSFNPSDPSWSQTAWHEPIHNLGGSIGAWMADTLFSTFGVLAYAIPPIMVIFCWTAFRQRDASEYLDYFALSLRLIGTLALILTSCGLAALNIDDLYYFASGGVIGSLFSNAMLPWFNGVGATLTLLCIWVVGLTLFTGWSWLVIAEKIGAAVLGSLTFITNRSRREERYDDEDSYHDDDHADGRDITGQEKGVVSNKGVVSNNAVVGAGVAASSALAHGDDDVLFSAPSVTDSIVEHGSVVATGTETTDTKATDTNDEYDPLLSPLRATDYSVQDATSSPIADVAVEPVLNHDAAAIYGTTPVMTNTATPPLYSFELPEESLPIQTHAAPTERPEPKLGAWDMSPTPVSHSPFDFSAIQRPVGQLESRQPGSNQSGSHQIHSAQSSHISVGNTPYMNPGLDAQIDGLSTTSLTNKPVLASGTVAAATAAAAFMPAFTATSDSSSQIKQGIGPELPRPNPVRIPTRRELASFGIKLPSQRMAEQELRERDGDETQNPQMAASSYGTEITSDEDAALQQAILRKAFADQQSERYALSTLAEQSSITERSPAAEMPTTPSQVSDLEDEQALQEAELRQAFAAQQQHRYGATGDTDNAVDNIRSVDTSTAFTFSPIADLVDDSPREPLFTLSPYVDETDVDEPVQLEGKEESLLQDYPEQVPTYQPPVQQAHLGQSAPTQPSHTQSTYGQSTYGQSTYGQSTPAPVSQPVVTSASAISTSVTPTSIASLNTAPVSAAPVAPSPQPPAFSQPTAAMDSLIHPFLMRNDQPLQKPTTPLPTLDLLSSPPAEEEPVDMFALEQTARLVEARLGDYRVKAEVVGISPGPVITRFELDLAPGVKASRISNLSRDLARSLSAIAVRVVEVIPGKPYVGLELPNKHRQTVYLREVLDCAKFRENPSPLAIVLGKDIAGQPVVADLAKMPHLLVAGTTGSGKSVGVNAMILSILYKATPDDVRFIMIDPKMLELSVYEGIPHLLTGVVTDMKDAANALRWCVGEMERRYKLMSALGVRNLAGYNERVAQAEAMGRPIPDPFWKPSDSMDISPPMLVKLPYIVVMVDEFADLMMTVGKKVEELIARLAQKARAAGIHLVLATQRPSVDVITGLIKANIPTRIAFTVSSKIDSRTILDQGGAESLLGMGDMLYMAPNSSIPVRVHGAFVRDQEVHAVVNDWKARGRPQYIDSILSGGEEGEGGGLGLDSDEELDPLFDQAVNFVLEKRRASISGVQRQFRIGYNRAARIIEQMEAQQIVSTPGHNGNREVLAPPPHE

SEQ ID NO: 77990 - protein, 554 aa, Yersinia pestis
MCSIFGVLELKTDPIELRKKALEMSRLMRHRGPDWSGVWANDKAILAHERLSIVDVNTGAQPLYNAAHTHILAVNGEIYNHQALRQQYSDRYAFQTGSDCEVILALYQEKGPAFLDDLQGMFAFVLYDTEKDAYLIGRDHLGIIPLYMGHDEHGNMFVASEMKALVPVCRTIKEFPAGSYLWSQDGEIREYYHRDWFDYDHVKDNVTDKIQLANALEDAVKSHLMSDVPYGVLLSGGLDSSVISAITKKFAARRVEDNERSEAWWPQLHSFAVGLIGSPDLRAAQEVANHLGTVHHEIHFTVQEGLDAIRDVIYHIETYDVTTIRASTPMYLMSRKIKAMGIKMVLSGEGSDEVFGGYLYFHKAPNAKELHEETVRKLLALHMYDCARANKAMSAWGVEARVPFLDKNFLDVAMRINPQDKMCGNGKMEKHILRECFESYLPHSVAWRQKEQFSDGVGYSWIDTLKEKAAEQVTDQQMETAHFRFPYNTPGSKEGYLYREIFEELFPLPSAAECVPGGPSVACSSAKAIEWDESFKNMDDPSGRAVGVHQDAYK

SEQ ID NO: 77991 - protein, 447 aa, Yersinia pestis
MSNMSLDFSQNEFQPLAARMRPLTLDQYIGQQHLLAPGKPLPRAIVAGQLHSMILWGPPGTGKTTLAEIIGRYGQADVERISAVTSGIKEIREAIERARQNRDAGRRTILFVDEVHRFNKSQQDAFLPHIEDGTITFIGATTENPSFELNSALLSRARVYLLKALTAADIEKVIDQAMSDSSRGYGGQNILLPDETRRMMSELVGGDARRALNSLEMMADMAEIDASGVRVLTPELLKEVSGERSARFDNKGDRYYDLISAVHKSIRGSAPDAALYWYARIITAGGDPLYVARRLLAIASEDVGNADPRAMQVAISAWDCFTRVGPAEGERAIAQAIVYLACAPKSNAVYAAFKAAMQDARDKPDFDVPEHLRNAPTKLMKEMGLGAEYRYAHDEQHAYAAGENYFPPEMAATRYYLPTSRGLEGKIGEKLAWLAEQDKNSPIKRYR

SEQ ID NO: 77992 - protein, 409 aa, Yersinia pestis
MMSTGGQAQIGNVDLVKQLNGAAVYRLIDQQGPISRIQIADLSQLAPASVTKITRQLLERGLIKEVDQQASTGGRRAISIVTENRQFHTVAVRLGRNDATITLFDMSGKSLGEEHYALPERTQETLEHALFNIISQFIDAYQRKLRELIAIAVILPGLVEQSKGIVRYMPHISVSNWPLVDNLQARFNVTSFVGHDIRSLALAEHYFGATRDCEDSILVRLHRGTGAGIIVNSQIFLGSNGNVGEIGHIQIDPLGDRCYCGNFGCLETVASNAAIENRVKHLLTQGYPSKLSLDDCHIGAICKAANRGDLLACEVIEHVGRYLGKAIAITINLFNPQKVVIAGEIIEAEKILLPAIQGCINTQVLKNFRQNLPIVTSQLNHQSAIGAFALAKRAMLNGVLLQRLLETHP

SEQ ID NO: 77993 - protein, 430 aa, Yersinia pestis
MLDPNMLRNELDAVAEKLARRGFKLDVEVLRQQEERRKVLQVETESLQAERNSRSKQIGAAKARGEDIEPLRLEVNALGEKLDAAKAELDKLQNEIRDLALSIPNLPDDSVPVGKNENDNIEVSRWGEPRKYDFDVKDHVSLGEMAGGLDFAAAVKLTGARFVVMKGQIARMHRALSQFMLDLHTEKHGYLEAYVPYLVNHATLYGTGQLPKFGEDLFHTKPLAEESDNSNYALIPTAEVPLTNLVRDEILEEDSLPLKLTAHTPCFRSEAGSYGRDTRGLIRMHQFDKVEMVQITRPEDSMAALEELTGHAEKVLQLLELPYRKVLLCTGDMGFGSSKTYDLEVWLPAQDTYREISSCSNMWDFQARRMQARYRNKTDRKTRLVHTLNGSGLAVGRTLVAVLENYQQADGRIQVPDVLRPYMGGLEYIG

SEQ ID NO: 77994 - protein, 266 aa, Yersinia pestis
MRLIPLRNTAEVGKWAARHIVNRINAFKPTAERPFILGLPTGGTPMEAYKYLIAMHKAGEVSFKHVVTFNMDEYVGLPKEHPESYYTFMHTNFFDHVDIPAENINLLNGNAADIDAECRRYEEKIKSYGKIHLFMGGVGVDGHIAFNEPASSLASRTRIKTLTQETRIANSRFFGGDANLVPKYALTVGVGTLLDAEEVMILVTGHGKAQALQAAVEGSINHMWTISCLQLHAKAIMVCDEPSTMELKVKTVKYFRELEAENVKDL

SEQ ID NO: 77995 - protein, 677 aa, Yersinia pestis
MSILGYLQKVGRALMVPVATLPAAAILMGVGYWIDPVGWGADNALAALFIKSGAAIIENMSVLFAIGVAYGMSKDKDGAAALTGFVGFLVLTTLCSPAAVSMIKQIPLDQVPAAFGKIENQFVGILVGIISAELYNRFSGVELPKALSFFSGRRLVPILTSFLMIAVAFMLMYIWPLIYNALVTFGEYIKDLGSVGAGIYAFFNRLLIPVGLHHALNSVFWFDVAGINDIPNFLGGQESINKGTGIVGITGRYQAGFFPIMMFGLPGAALAIYHCARPENKAKVAGIMMAGAFAAFFTGITEPLEFSFMFVAPVLYFLHAVLTGISVFIAASMHWIAGFGFSAGLVDMVLSSRNPLATQWYMLIPQGLIFFVIYYLVFRFTIQKFNLLTPGRELAVEGSEEDGYDVNVDKTPAVNESEINSLARRYIGAIGGSDNLTAIDACITRLRLNVKDSALVNDSVAKRLGASGVIRLNKQSVQIIVGTRAELIAAAMRTVLAGGPIPAASSNAAPTGARPQAVINTAKTASLVLVSPITGDVVPLAQVPDEAFASKAVGEGVAIRPTDKIVVSPASGTIVKIFNTDHAFCLETETGAEIVVHIGIDTVKLNGQGFTRLVEEGTTVVAGQPVLELDLAYLNANAHSMISPVVVSNIDDYAGISLLASGSVVAGQSQLFEIRGK

SEQ ID NO: 77996 - protein, 285 aa, Yersinia pestis
MGKLALAAKITHVPSMYLSELPGKHHGCRQAAINGHLEISRRCREQGVDTLIVFDTHWLVNSAYHINCSDSFSGVYTSNELPHFIRDMAYEYEGNPALGQMIAAEACKLGVRAQAHNIPSLKLEYGTLVPMRYMNSDKHFKVISISAFCTVHAFDDSRNLGQAIINAIEHYDGIVAVLASGSLSHRFIDDQRAEEGMNSYTREFDHQMDERVVELWREGKFSEFCQMLPEYAQYCFGEGNMHDTVMLLGMLGWDKYDGKVEFVTDLFASSGTGQVNAIFPLAVYG

SEQ ID NO: 77997 - protein, 555 aa, Yersinia pestis
MSEAEARPSNFIRQIIDEDLASGKHTSVHTRFPPEPNGYLHIGHAKSICLNFGIAEDYQGQCNLRFDDTNPVKEDVEFVESIKRDVEWLGFTWSGDVRYSSDYFDQLYQYAVELINKGLAYVDELTPEQMREYRGTLTAPGKNSPYRDRSVEENLALFEKMRAGGFAEGTACLRAKIDMASPFIVMRDPVLYRIKFAEHHQSGNKWCIYPMYDFTHCISDALEGITHSLCTLEFQDNRRLYDWVLDNISIDCHPRQYEFSRLNLEYTIMSKRKLNQLVTEKVVEGWDDPRMPTISGLRRRGYTAASIREFCRRIGVTKQDNNVEMMSLESCIRDDLNEHAPRAMAVLDPIKVVIENRAAGEEWLTMPNHPNNPEMGSRQVPFDSEIYIDRADFREEANKQYKRLVLGKEVRLRNAYVIKAERVEKDAEGNVTTLYCSYDAETLNKDPADGRKVKGVIHWVSVAHALPAEIRLYDRLFNVPNPAAAEDFLSTINPESLVIRQGFVEPSLADAVSDKTYQFEREGYFCADSRYSRPGALVFNRTVGLRDTWAAKATQ

SEQ ID NO: 77998 - protein, 132 aa, Yersinia pestis
MAHFYAECTDNIREQAELPVLFSNVNQTLVNTGLFPLAGIRSRAIWLDTWQMADGQQDYAFVHMTLKIGYGRSIEHRQAVGKTLFALIQAHFAALMSQRYLALSFVIEELDPTLSFKQNNAHTLFQQGTSAC

SEQ ID NO: 77999 - protein, 268 aa, Yersinia pestis
MFPLTNKFKQALKAKKPQIGLWLGLCSNYSAEILAGAGFDWLLIDDEHAPNDVQRILGQLQTIASYPSQPVVRPAWNDPVMIKKLLDIGAQTLLLPMIQNAAQARAAISATRYPPQGIRGVGSALARASRWNRIADYVQQADEQICVLLQIETREALRNLPEILAVDGVDGVFIGPADLASDMGFAGNPHHPEVRQAIDSAVMKIKTADKAAGILMTTPELAEYYLKLGALFVAVGVDTTLLARTAEALAARFGVGNHHPPLAPSGGY

SEQ ID NO: 78000 - protein, 361 aa, Yersinia pestis
MTQVYNFSAGPAMLPVEVLRRAEQELRNWHGLGTSVMEISHRSKEFMQVAEESEKDLRDLLQIPANYKVLFCHGGARAQFAAVPLNLLGDRNSADYIDGGYWAHSAIKEAQKYCTPNVIDVTTHDNGLTGIQPMKQWKLSDNAAYVHYCPNETIDGVAINEQPDFGNKVVVADYSSSILSRPIDISRYGVIYAGAQKNIGPAGLTLVIVREDLLGKAHTALPSILDYKVLADNDSMFNTPPTFAWYLSGLVFKWLKEQGGLGEMEKRNQAKAELLYGAIDRTGFYRNQVAITNRSWMNVPFQMADASLDKLFLSEAEAQGLQALKGHRVAGGMRASIYNAMPIEGVKALTDFMADFERRHG

SEQ ID NO: 78001 - protein, 95 aa, Yersinia pestis
MAKEQTDRTTLDLFADERRPGRPKTNPLSRDEQLRINKRNQLRRDKVRGLRRVELKINADAVDALNSLAEQRNISRSELIEQMLLAQLAHDQEGC

SEQ ID NO: 78002 - protein, 230 aa, Yersinia pestis
MTAIAPVITVDGPSGAGKGTLCKALAESLNWRLLDSGAIYRVLALAALHHQVDISTEEALVPLAAHLDVRFVSQNGQLQVILEGEDVSNEIRTETVGNTASQAAAFPRVREALLRRQRAFREAPGLIADGRDMGTIVFPDAPVKIFLDASSQERAHRRMLQLQERGFNVNFERLLAEIQERDNRDRNRSVAPLVPAADALVLDSTSMSIEQVIEQALAYAQRILALPLKK

SEQ ID NO: 78003 - protein, 557 aa, Yersinia pestis
MIESFAQLFEESLKTIETRPGSIVRGVVVSIDKDIVLVDAGLKSESAIPAEQFKNAQGELEIQVGDEVDVALDAVEDGFGETLLSREKAKRHEAWLMLEKAYEEAATVTGVINGKVKGGFTVELNGIRAFLPGSLVDVRPVRDTLHLEGKELEFKVIKLDQKRNNVVVSRRAVIESENSAERDQLLENLQEGMEVKGIVKNLTDYGAFVDLGGVDGLLHITDMAWKRVKHPSEIVNVGDEITVKVLKFDRERTRVSLGLKQLGEDPWVAIAKRYPESTKLTGRVTNLTDYGCFVEIEEGVEGLVHVSEMDWTNKNIHPSKVVNVGDVVEVMVLDIDEERRRISLGLKQCKSNPWQLFAETHNKNDRVEGKIKSITDFGIFIGLDGGIDGLVHLSDISWNVAGEEAVREYKKGDEIAAVVLQVDAERERISLGVKQLAEDPFNNYLSVNKKGAIVTGKVTAVDAKGATVELAGGVEGYLRAFEATRDRVEDATLVLNVGDEVEAKYTGVDRKNRVISLSVRAKDEADEKDAIATVNTKPEESNFSSAMAEAFKAAKGE

SEQ ID NO: 78004 - protein, 255 aa, Yersinia pestis
MKLNFRLQNAPSPTSALPIILIHGLFGNLDNLGVLARDLQQHHNVIQVDLRNHGLSPRAPQMDYPVIAQDVLALMDELAITQAIIIGHSMGGKVAMAMTALAPNRVEKLVAIDIAPVNYQVRRHDTIFAALNAVSAAGVTQRNEAAQLMRTLIKEEGVIQFLLKSFQGGEWRFNVPALWDQYENIIGWQPIPPWPHPILFIRGELSPYIQDSYRDDIARQFPQARAHVVAGTGHWVHAEKPDSVLRAIHRFLDAA

SEQ ID NO: 78005 - protein, 454 aa, Yersinia pestis
MISVFDMFKIGIGPSSSHTVGPMKAGKQFVDLLITEGLMPSITRVAVDVYGSLSLTGKGHHTDIAIIMGLAGNLPDTVDIDSIPAFIRDVELRQKLMLANGLHEVDFPREGGMVFRSDNLPLHENGMQIHAFAGDEKVLSKTYYSIGGGFIVDEENFGKASVNDVSVPYPFNSAAEILANCEQTGLSISGMVMQNELAMHSKEEIESYFTAIWQTMRACIDRGLNTEGVLPGPLRVPRRASALRRLLVSSDKLSSDPMIVIDWVNMFALAVNEENAAGGRVVTAPTNGACGIVPAVLAYYDHFIEPVTPEIFIRYFLASGAIGILYKMNASISGAEVGCQGEVGVACSMAAAGLAELLGASPIQVCIAAEIGMEHNLGLTCDPVAGQVQVPCIERNAIASVKAINSARMAMRRTSEPRVSLDKVIETMFETGKDMNAKYRETSRGGLAIKVQCT

SEQ ID NO: 78006 - protein, 61 aa, Yersinia pestis
MTQTEVYGLGFRFKACSALLESGLWSKDDVECQMSHQERNTVRSSSIHKAEHIDKRKLMVQ

SEQ ID NO: 78007 - protein, 199 aa, Yersinia pestis
MSELITGQYLSEFINRFQLQLPQPDNVLTHSHYFSATNRRAAVLIPIICRPEPTLLLTRRADHLRKHAGQVAFPGGKADPDDQSLISTALREAEEEVAIPASVVHVLGKLAPLNSSSGYHVTPIVGLVPANIPFYGNDEEVAGLFEIPLHEALSLSRYHSLDIHREGINHRVYLSWYENQFIWGLTATIIRHLAQQVSI

SEQ ID NO: 78008 - protein, 458 aa, Yersinia pestis
MCEKFLTVKELPYHPDALLQQFTPLANQAWAMLLHSGFAQHPHSRFDILVADPKITLTTHGDKTVIVSDQGQETSLADPFSLLQQQLDKFAPAMPAHPDLPFQGGALGLFGYDLGRRVEKLPELAAHDIALPDMAIGLYDWALIADHSRQKLTLVSLGDAEQRLHWLHQQTTDENLVPFKLTVPWQADMSREQYGEKFRQIQAYLRSGDCYQINLAQRFSAEYQGDEWQAFLSLSRSNQAPFSAFIRLPDNAILSVSPERFLWLENHQVQTRPIKGTLPRLADPEQDRQQAERLANSAKDQAENLMIVDLLRNDIGRVARPGSVRVPELFVVEPFPAVHHLVSTITAILPPECSPTELLRACFPGGSITGAPKVRAMEIIEQLEPYRRNAYCGNIGYISCCGTMDTNITIRTLMTENGKIYCSAGGGIVADSQEQAEYQETFDKVARILPQLGECVIS

SEQ ID NO: 78009 - protein, 328 aa, Yersinia pestis
MNNSAFNFQTLSPDLIMDALEGAGLRVDSGLTALNSYENRVYQFMDEESKRYVVKFYRPERWSSEQITEEHQFSLDLAESEIPVIAPLRLNGKTLHTHCGFFFAVFPSVGGRQYEIDNLDQLEWVGRFLGRIHQAARNSLFVARPTMGIEEYLTEPRQLLANCDLVPVKQRDKFLAAADLLITTIKQYWHTEWQPLRLHGDCHPGNILWRDGPMFVDLDDARNGPAIQDLWMLLHGDRRDQSMQLDILLEAYSEFADFDQRELALIEPLRAMRMVYYLAWVARRWQDPAFPKSFPWMAESDFWLQQTASFTEQVKLLQEPPLQLMPMY

SEQ ID NO: 78010 - protein, 582 aa, Yersinia pestis
MMNDKDLSTWQTFRRLWPTISPYKAGLIVAAIALILNAASDTFMLSLLKPLLDDGFGNSNSSILKWMPLAVIGLMVVRGVTGFVSSYCISWVSGKVVMHIRRRLFSHMMGMPVSFFDQQSTGTLLSRITYDSEQVAASSSSALVTVVREGASIIGLFIMMFYYSWQLSLILIVIAPIVSISIRLVSKRFRNISKNMQNTMGEVTTSAEQMLKGHKEVLIFGGQKVETERFDAVSNRMRQQGMKLVSASSISDPIIQLIASFALALVLYAASFPSVMETLTAGTITVVFSAMIALMRPLKSLTNVNTQFQRGMAACQTLFSILDMEQEKDEGKLEVERAKGDIEFRHVTFYYPGKDTPALNDINIHLEAGKTVALVGRSGSGKSTIANLLTRFYDVSEGSILLDGHDLRDYRLGALRNQVALVSQNVHLFNDTVANNIAYARNEQYSRAEIEEAARMAYAMDFINKMEHGLDTVIGENGIMLSGGQRQRIAIARALLRNCPILILDEATSALDTESERAIQAALDELQKNRTSLVIAHRLSTIEKADEIVVIEDGRIVERGVHAELLVQQGVYAQLNRMQFGQ

SEQ ID NO: 78011 - protein, 460 aa, Yersinia pestis
MSTTSFSSLTLPAEQLSNLNELGYTEMTPVQAAVLPAILNGQDVRAKAKTGSGKTAAFGIGLLDKIAVGEFVTQALVLCPTRELADQVSKELRRLARFTQNIKILTLCGGQPMGHQLDSLVHAPHIVVGTPGRIQEHLRKKTLVLDELKTLVLDEADRMLDMGFSDAIDDVIAYTPPQRQTLLFSATYPSGIEQISARVQRQPLNVEVGDTDEEPAIEQVFFETTREKRLPLLISVLSHYQPASCVVFCNTKKDCQSVYESLESRGISVLALHGDLEQRDRDQVLVRFANRSCRVLVATDVAARGLDIKDLELVINFELAFDPEIHIHRIGRTGRAGMSGLAVSLCTPQEMVRAHTIEDYLQIKLKWTPAEQVSRSTNIMLEPEMVTLCIDGGRKAKIRPGDILGALTGDAGLTAADVGKIDMFPVHAYVAIRKASAKRALQQLQQGKIKGKNCKARLLK

SEQ ID NO: 78012 - protein, 932 aa, Yersinia pestis
MAQIAENPLLLVDGSSYLYRAYHAFPPLTNGSGEPTGAMYGVLNMLRSLLLQYRPSHVAVVFDAKGKTFRDELFAEYKSHRPPMPDDLRVQIEPLHQMVKAMGLPLLVVSGVEADDVIGTLAREAEKAGHSVLISTGDKDMAQLVTPNITLINTMNNTILGPQDVCDKYGVPPELIIDFLALMGDSSDNIPGVPGVGEKTAQALLQGLGGLDTLFSNLDKISTLTFRGAKTMSAKLEQNKDVAYLSYKLATIKTDVELDVTCDELTVSPPDDKQLHQLFSRYEFKRWLADVEAGKWLDSKKDRPTGQTSSQSFVAADTAPTAEVTAVLSQENYQTILDEKALADWIERLKAAEVFAFDTETDGLDTLSCNLIGMSFAVAPGEAAYLPLAHDYLDAPPQLDRDWVLATLKPLLEDDKALKVGQNLKFDKSMLARYGIDLKGIAFDTMLESYVLDSVAGRHDMDSLAERYLNHKTITFEEIAGKGKNQLTFNQIALEQAGPYAAEDADVTLQLHLVLWPKLQQSEGLKRVFQEIEMPLLPILSRIERTGVLIDQNILAAHSKELTIRLDELEKQAHELAEEPFNLASPKQLQAILYEKQKLPILKKTPGGAASTNEEVLAELALDYPLPKVILEYRGLAKLKSTYTDKLPLMINPVSGRVHTSYHQAVTATGRLSSRDPNLQNIPVRNEEGRRIRQAFIAPKGYCIMAADYSQIELRIMAHLSQDNGLLAAFAAGQDIHRATAAEVFGSPLEKVTTEQRRSAKAINFGLIYGMSAFGLARQLGIPRGEAQRYMDLYFERYPGVLEYMERTRKQAAEQGYVTTLDGRRLYLPDIHSRNANRRKAAEREAINAPMQGTAADIIKRAMIAVDGWLQQEPEPLVRVIMQVHDELVFEVHESVLQSAEQKIRELMEQSMQLAVPLKVDVGVGANWDQAH

SEQ ID NO: 78013 - protein, 222 aa, Yersinia pestis
MFSFTVQQRMTALVWLSLFHIVIITSSNYLVQLPIAIFGFHTTWGAFTFPFIFLATDLTVRIFGAPLARRIILSVMVPALLISYLISALFYQGSWQGFPALTSFNLVVARIAVASFMAYVLGQILDVQVFNRLRQRNAWWVAPTAAMFFGNISDTMAFFFIAFYRSSDPFMAAHWVEIALVDYSFKLLICMLFFLPAYGVMLNVLLKYFARQTGQPVLATER

SEQ ID NO: 78014 - protein, 349 aa, Yersinia pestis
MATGTLPDAGQILNTLINSILLLDDDLAIHYANPAAQQLLAQSSRKLFGTPLPDLLGYFSLNIVLMRESLQAGQGFTDNEVTLVVDGRAHILSLTAQSLAEGFILLELAPMDNQRRLSQEQLQHAQQVAARDLVRGLAHEIKNPLGGLRGAAQLLAKALPDPALLEYTQVIIEQADRLRNLVDRLLGPQRPGQHITQSIHQVAERVCQLVSLEKPDNVTLIRDYDPSLPELAHDPDQIEQVLLNITRNALQALGETGGTITLRTRTAFQVTLHGMRYRLAARIDIEDDGPGVPTQLQDTVFYPMVSGREGGTGLGLSIARNLIDQHSGKIEFNSWPGHTEFSVYLPIRQ

SEQ ID NO: 78015 - protein, 323 aa, Yersinia pestis
MNVVKPITRISAINWNKIEDDKDLEVWNRLTSNFWLPEKVPLSNDIPSWATLTPHEQQLTIRVFTGLTLLDTIQNTLGAPALIKDAITPHEEAIFSNISFMEAVHARSYSSIFSTLCLTSDVDDAYRWSEDNGPLQKKADIISQHYHNDDPLKKKIASVFLESFLFYSGFYLPMYWSSRAKLTNTADLIRLIIRDEAVHGYYIGYKFQKGLGKIDSAHRQEIKNFAFDLLQDLYDNEVRYTEDLYDHVGWTEDVKKFLHYNANKALMNLGYEALFPASQAAVSPAILAALSPNADENHDFFSGSGSSYVIGKAVNTEDEDWDF

SEQ ID NO: 78016 - protein, 469 aa, Yersinia pestis
MSAEHVLTMLNEHEVKFVDLRFTDTKGKEQHITIPAHQVNADFFEEGKMFDGSSIGGWKGINESDMVLMPDASTAVMDPFFADSTLIIRCDILEPGTMQGYDRDPRSISKRAEDFLKSSGIADTVLFGPEPEFFLFDDIRFGSSINGSHVSIDDVEGAWNSSTKYEGGNKGHRPAVKGGYFPVPPVDSAQDLRSAMCLTMEEMGLVVEAHHHEVATAGQNEVATRFNTMTKKADEIQIYKYVVHNVAHAFGKTATFMPKPMFGDNGSGMHCHMSLSKNGNNLFAGDKYGGLSEIALFYIGGIIKHAKAINALANPTTNSYKRLVPGYEAPVMLAYSARNRSASIRIPVVASPKARRIEARFPDPAANPYLCFAALLMAGLDGIINKIHPGDAMDKNLYDLPPEEEAEIPKVAGSLDEAMAALNEDREFLTRGGVFTDDAIDAYIELRREEMDRVRMTPHPVEFELYYSV

SEQ ID NO: 78017 - protein, 415 aa, Yersinia pestis
MVGDSRLTRDNSFESCIKCTVCTTYCPVAKVNPLYPGPKQAGPDGERLRLKDPALYDDALKYCTNCKRCEVACPSDVKIGDIIQRAKASHSTNKPKLRDAILSHTDIMGTLSTPFAPVINAVTGLKPVRVLLDKALKIDHRRELPKYSFGTFRRWYRKQAEKQQQYTEQVAFFHGCFVNYNHPQLGKDLVSVFNAMNIGVQLLKREKCCGVPLIVNGFIEQAKKQARVNLESLTDTVIGRDIPVVATSSSCTFTLRDEYPHLLDVDTTPVRDKVELATRYLYRLLDQGRELPLKPLFSLNPLLASQEAPLRIAYHTPCHMEKMGWTAYTLALLQRIPGVELVVLDSQCCGIAGTYGFKSENYATSQGIGASLFQQIEDSGVDLVITDCETCKWQIEMSTSKKCEHPITLLARALA

SEQ ID NO: 78018 - protein, 693 aa, Yersinia pestis
MLNLYDADGRIQFDKDRLAARQYFLQHVNQNTVFFHNLQEKIDYLIEEGYYEKEVLDQYDFSFIKSLFQQAYSKKFRFPTFLGAFKYYTSYTLKTFDGKRYLERYEDRVCMVALTLATGNQTLARELVEEIISGRFQPATPTFLNCGKKQRGELVSCFLLRIEDNMESIGRSINSALQLSKRGGGVAFLLSNIREVGAPIKRIENQSSGVIPIMKMLEDAFSYANQLGARQGAGAVYLHAHHPDILRFLDTKRENADEKVRIKTLSLGVVIPDITFELAKNNEEMYLFSPYDIEQVYGVPMSEISISEKYREMVDNKRIRKSKIKAREFFQILAEIQFESGYPYMMFEDTVNRANPIKGRINMSNLCSEILQVNAPTEYHEDLSYRRIGKDISCNLGSLNIAQVMDSPDFGKSIEIAIRGLTAVSEMSNIRSVPSIEKGNQESHAIGLGQMNLHGYLARERLFYGSEEALDFTNIYFYTVAYHAIRASNQLAIERASHFKGFDESDYASGAFFSKYIEQSWQPKTARVQALFADAGIAIPNQQDWIALRQSVMEHGIYNQNLQAVPPTGSISYINHSTSSIHPIVSPIEIRKEGKIGRVYYPAPYMTNDNLEYYQDAYQIGPEKIIDTYAAATQHVDQGLSLTLFFRDTATTRDINKAQIYAWKKGIKTIYYIRLRQMALEGTEVEGCVSCSL

SEQ ID NO: 78019 - protein, 607 aa, Yersinia pestis
MIENLRNIAIIAHVDHGKTTLVDKLLQQSGTFGERTEATERVMDSNDLEKERGITILAKNTAINWKDYRINIVDTPGHADFGGEVERVMSMVDSVLLVVDAMDGPMPQTRFVTKKAFAHGLKPIVVINKVDRPGARPDWVVDQVFDLFVNLDATDEQLDFPIIYASALMGIAGEDHNDMAEDMTPLYQAIIDHVPAPDVDSSGPLQMQISQLDYNNYVGVIGIGRIKRGIVKPNQQVTVIDSEGKTRNGKVGKVLGHMGLERIETTQAEAGDIVAITGLGELNISDTICDVNAVEALPPLSVDEPTVTMYFCVNTSPFCGKEGKYVTSRQILDRLNKELIHNVALRVEETEDADAFRVSGRGELHLSVLIENMRREGFELAVSRPKVINRIIDGRNQEPFESVTLDIEEQHQGAVMQAMGERKGDVKDMIPDGKGRIRLDYMIPSRGLIGFRTEFMTMTSGTGLLYSTFSHYDDVRPGDIGQRQNGVLISNGQGKAVAFALYKLQDRGKLFIGHGTEVYEGQIIGIHSRSNDLTVNCLTGKQLTNMRASGTDEATTLVPFLKKTLEQALEFIDDDELVEVTPQSIRIRKRHLTENDRKRAGRGPREG

SEQ ID NO: 78020 - protein, 134 aa, Yersinia pestis
MNPLVYFSSSSENSHRFVEKLQLPAIRIPIAGAREKLRVEQPYILLVPSYGGGSPVGAVPIQVIRFLNDVHNRSLIRGVIAAGNTNFGDAYCLAGDIISHKCQVPYLYRFELLGTAEDVANVRKGVTEFWQRQN

SEQ ID NO: 78021 - protein, 269 aa, Yersinia pestis
MYHVVASDLDGTLLSPNHTLTPYTKETLKLLTQRDVHFVFATGRHHIDVAQIRDNLEISAFMITSNGARVHNTEGELIFSHNLDADIARDLYNLEHHNPDILTNVYLGDEWFMNRECPEQEEFFRESVFNYQVFEPALLPTDGVCKVYFTCEDHDKLLILEEAINARWGDRVNVSFSFPTCLEVMGGGVSKGHALEQVAKIIGYSLKDCIAFGDGMNDVEMLSMSGKGCIMRDAHQRLKDVLPNLEVIGSNADDAVPHYLRKMFLGKEE

SEQ ID NO: 78022 - protein, 337 aa, Yersinia pestis
MLLGHHMNNWLTREEQFAAFINGPLLDFWQQRDEQTFMGVDNIPIRYVRFRAPHHTQVVVVVPGRIESYVKYPEVAYDLFQQGYDVIVLDHRGQGRSGRMLDDHNRGHVIKFDDYIEDFAQLVQIEITGSHYQQRFALAHSMGGAILTRFLAREPDVFNAVALCAPMFGIHLPLPGWLARRIVNWAEGHQKLRDYYAIGTGHWRPLPYLVNMLTHSRERYRRYLRQYSDTPEIRVGGPTYHWLRESLLVGEQIIAEAEKITTPVLLLQASEDRVVHNPAHDAFSQAMTLAGHPCEGGRPQVIQGARHEILFERDTLRAEALSAILRFFAQHQSSVGH

SEQ ID NO: 78023 - protein, 386 aa, Yersinia pestis
MAEDSDQEKSEEPTASKLEKAREKGQIPRSRELTSMLMLGAGLTILWMSGESMARQLSAMVAQGLHFDHSMVSNDKQMLRQIGMLLRQTLLAMLPIFAGLVIVALAVPMLLGGVLFSGESIKFDLKRMSPVAGLKRMFSSQALAELLKAILKATLVGWVTGLFLWHNWPDMMRLIAAPPVAALGDALHLIIFCGLVVVLGLSPMVGFDVFYQITSHIKKLRMTKQDIRDEFKNQEGDPHVKGRIRQQQRAMARRRMMVDVPKADVIVTNPTHYAVALQYNESKMSAPKVLAKGAGAVALRIRELGAEHRIPLLEAPPLARALFRHSEVGQHIPATLYAAVAEVLAWVYQLKRWKREGGLIPKKPEHLPVPEALDFATESETKSETD

SEQ ID NO: 78024 - protein, 206 aa, Yersinia pestis
MTLDWWLTYLLTTLILSLSPGSGAINTMSTAISHGTRGVVASIGGLQLGLAVHIVLVGVGLGALVSQSLLAFEILKWLGAAYLIWLGIQQWRAAGSLDLHALANSMPRRKLFKRAVFVNLTNPKSIVFLAALFPQFVLPQQPQVAQYLILGSTSVIVDIIVMIGYATLATRIARWIKSPQQMKLLNRIFGGLFMLIGALLATARKV

SEQ ID NO: 78025 - protein, 610 aa, Yersinia pestis
MSTAAVINRELLAVQVLRDTFGYQQFRPGQQEIINATLSGQDCLVVMPTGGGKSLCYQIPALVTDGLTLVVSPLISLMKDQVDQLLAYGVGAGCLNSSQTREQQLAVMDGCRSGQIKLLYIAPERLVMESFLDQLYQWRPALLAVDEAHCISQWGHDFRPEYRALGQLKQRFPDLPVIALTATADEATRGDIVRLLNLDQPLIQISSFDRPNIRYTLVEKFKPLDQLWRFVQDQRGKSGIIYCNSRAKVEDTTARLQSRGLSVAAYHAGLDNERRAQVQEAFQRDDLQVVVATVAFGMGINKPNVRFVVHFDIPRTIESYYQETGRAGRDGLPAEAVLLYDPADMAWLRRCLEEKPAGAQQDIERHKLNAMGAFAEAQTCRRLVLLNYFGEGKQQPCGNCDICLDPPKRYDGLADAQKALSCVYRVGQRFGLGYIVEVLRGANNQRIREMGHDKLSVYGIGREQTHEHWVSVLRQLIHLGLLSQNIAQFSALQLTEAARPVLRAELPLQLAVPRIQSLKVRSSANQKSYGGNYDRKLFAKLRKLRKSIADEGNIPPYVVFNDATLLEMAEQMPITASELLSVNGVGQRKLERFGAPFMALIRDHVDNNDD

SEQ ID NO: 78026 - protein, 100 aa, Yersinia pestis
MQLTPREVEKLMIYTLSDVAFKRKARGLKLNYPEAVSIITVTAMEGARDGKSVEDVMKEASKVLTKDDVMDGVADLIPNVQVEAIFTDGSRLVTVHDPIK

SEQ ID NO: 78027 - protein, 572 aa, Yersinia pestis
MPQISRQEYAGLFGPTTGDKIRLGDTNLFIEIEKDLRGYGEESVYGGGKSLRDGMGANNNLTRDNGVLDLVITNVTIVDARLGVIKADVGIRDGKIAGIGKSGNPGVMDGVTQGMVVGVSTDAISGEHLILTAAGIDSHIHLISPQQAYHALSNGVATFFGGGIGPTDGTNGTTVTPGPWNIRQMLRSIEGLPVNVGILGKGNSYGRGPLLEQAIAGVVGYKVHEDWGATANALRHALRMADEVDIQVSVHTDSLNECGYVEDTIDAFEGRTIHTFHTEGAGGGHAPDIIRVASQTNVLPSSTNPTLPYGVNSQAELFDMIMVCHNLNPNVPADVSFAESRVRPETIAAENVLHDMGVISMFSSDSQAMGRVGENWLRILQTADAMKAARGKLPEDAAGNDNFRVLRYVAKITINPAITQGVSHVIGSVEVGKMADLVLWDPRFFGAKPKMVIKGGMINWAAMGDPNASLPTPQPVFYRPMFGAMGKTLQDTCVTFVSQAALDDGVKEKAGLDRQVIAVKNCRTISKRDLVRNDQTPNIEVDPETFAVKVDGVHATCEPIATASMNQRYFFG

SEQ ID NO: 78028 - protein, 228 aa, Yersinia pestis
MNASDLIRIMQFGDSVLPVGAFTFSNGVESAIQTGIVHDVATLKGFVLTALKQAASCDGMGVVVAHRAVVADDRDGIIRADWAVNNRKLNEESRLMATRMGKKLAEMSIHVVEHPLISWWLEQIKNGNTAGTYPVTQAVVMAAQGIGQREVVVMHQYGVAMTILSAAMRLMRVTHFDTQHILFELNHDIEKFCDIAEIGDINQMSSYVPIVDVLAAVHVKAHVRLFSN

SEQ ID NO: 78029 - protein, 225 aa, Yersinia pestis
MAITNSLTESDYGTTGTSSTTGSSSQDLQNRFLTLLVAQLKNQDPTNPMENNELTTQLAQINTVSGIEKLNTTLGAITGQIDSSQSLYATSLIGRGVMVPGTNIFTGSTDGTVSTTPFGLELQRPADKVTATISDSNGQVVRTIEIGGLNAGVHSFTWDGSLDAGGNAPDGAYTVAITASNGGESLVATPLNYAIVNGVTRGADGSKLDLGLAGTITLDEVRQIL

SEQ ID NO: 78030 - protein, 220 aa, Yersinia pestis
MTDKSTARKKITRIGIGGPVGSGKTAIIEVITPILIKRGIKPLIITNDIVTTEDAKQVKRTLKGILDEEKILGVETGACPHTAVREDPSMNIAAVEEMEERFPESDLIMIESGGDNLTLTFSPALADFYIYVIDVAEGEKIPRKNGPGLVQADILVINKIDLAPYVGASLDVMESDTKVVRGNRPYILTNCKTGQGIEELVDMIMRDFLFTHVQPEGEQA

SEQ ID NO: 78031 - protein, 174 aa, Yersinia pestis
MTTIVSVRRDGHVVIGGDGQVTLGNTVMKGNAKKVRRLYNNKVIAGFAGGTADAFTLFELFERKLEMHQGHLTKAAVELAKDWRTDRMLRKLEALLAVADETASLIITGNGDVVQPEDDLIAIGSGGPYAQSAARALLENTELGARDIVEKSLSIAGDICIYTNRFQTIEELTY

SEQ ID NO: 78032 - protein, 702 aa, Yersinia pestis
MYLFESLNLLIQRYLPEEQIKRLKQAYLVARDAHEGQTRSSGEPYITHPVAVACILAEMRLDYETLMAALLHDVIEDTPATYQDMEQLFGKSVAELVEGVSKLDKLNFRDKKEAQAENFRKMIMAMVQDIRVILIKLADRTHNMRTLGSLRPDKRRRIARETLEIYSPLAHRLGIHHLKTELEELGFEALYPNRYRVIKEVVKAARGNRKEMIQKILAEIEGRLTEAGIPCRVSGREKHLYSIYCKMHLKEQRFHSIMDIYAFRVIVKEVDTCYRVLGQAHSLYKPRPGRVKDYIAIPKANGYQSLHTSLIGPHGVPVEVQIRTEDMDQMAEMGVAAHWAYKEQGESGTTAQIRAQRWMQSLLELQQSAGSSFEFIESVKSDLFPDEIYVFTPEGRIVELPAGATPVDFAYVVHTDIGHACVGARVDRQPYPLSQPLSSGQTVEIITAPGARPNAAWLNFVVSSKARAKIRQLLKNLKRDESVSLGRRLLNHALGNGRKLSDISEENIKHELDRMKLATVDDLLAEIGLGNAMSVVVAKNLLGDPSTLGTSASGTRKLPIKGADGVLITFAKCCRPIPGDPIIAHISPGKGLVIHHESCRNIRGYQKEPEKFMAVEWDQETEQEFIAEIKVDMFNQQGALANLTAAINAAESNIQSLNTEEKDGRVYSAFIRLTTRNRVHLANIMRKIRIMPDVVKVSRNRN

SEQ ID NO: 78033 - protein, 720 aa, Yersinia pestis
MDVSDLLDSLNEKQRDAVAAPRGNLLVLAGAGSGKTRVLVHRIAWLLSVENASPYSIISVTFTNKAAAEMRHRIEHLIGTSQGGMWIGTFHGLAHRLLRAHHLDANLPQDFQILDSDDQLRLLKRLVKALNLDEKQWPPRQAMWYINGKKDEGLRPQHIESYGNPVEATWLRIYQAYQEACDRAGLVDFAELLLRAHELWLNKPHILNHYRERFTNILVDEFQDTNNIQYAWIRLLAGERSNVMIVGDDDQSIYGWRGAQVENIQRFLKDFPGAETIRLEQNYRSTSIILAAANALIANNDGRMGKNLWTDGAEGEPISLYCAFNELDEARFVVNRIKAWQDNGGALNDCAILYRSNAQSRVLEEALLQTATPYRIYGGQRFFDRQEIKDSLAYLRLISNRNDDAAFERVVNTPTRGIGDRTLDVVRQTARDRQLTLWQSTRAMLQEKVLAGRAASALQRFVELIDSLARETADMPLHVQTDRVIRDSGLWSMYEQEKGEKGQARIENLEELVTATRQYSYQDEDQDLMPLQAFLSHAALEAGDGQADAYQDAVQLMTLHSAKGLEFPQVFIVGMEEGMFPSQMSLDEGGRLEEERRLAYVGLTRAMQKLTLCYAESRRLYGKEVNHRPSRFIGELPQECVEEVRLRASVSRPVNHRRMGTPMHENDSGFSLGQRVRHPKFGEGTIVNLEGSGEHNRLQVAFPGEGIKWLVAAYARLEPV

SEQ ID NO: 78034 - protein, 238 aa, Yersinia pestis
MHFYRPLERISAITFDLDDTLYDNRPVIARTEQQSVAFLQQYHPNLALLQPADFQRLRAELLAQDPGIYHDVTQWRWQAIELGLMRHGLSKAEAQAGADAAMANFALWRSRIDVPQATHDTLSALAEHYPLVAITNGNADPKACGLDRYFQFVLRSGPHGRAKPFRDMYHKAANHLDIPLKHILHVGDDLTTDVAGSLRCGMQACWINDRQQNLMTARDSRLLPHIEISQLASLTALL

SEQ ID NO: 78035 - protein, 303 aa, Yersinia pestis
MTEFSASLAPQVEAFLRYLSIERQLSPLTVTSYRRQLSALMEIGEQMGLAHWQTLDAAQVRSLVSRSKRAGLHASSLALRLSALRSFLNWLVSQGVLPANPAKGVSTPRSGRHLPKNIDVDEVNKLLSIDLNDPLAVRDRAMLEVMYGAGLRLSELVGMNCKHVDLASGDVWVMGKGSKERKVPLGKTAVTWLQHWLALRELFEPQDDAIFLANTGKRISARNVQKRFAEWGVKQGVSSHIHPHKLRHSFATHMLESSGDLRAVQELLGHANLTTTQIYTHLDFQHLATVYDAAHPRAKRGKS

SEQ ID NO: 78036 - protein, 287 aa, Yersinia pestis
MIRSMTAYARRDIKGEWGNAAWELRSVNQRYLETYIRLPEQFRSLEPVIRERIRSRLTRGKIECHLRFELDANAQSSLILNEKLAKQLVEAGNWVKMQSDEGEINPVDILRWPGVMSAEEQDLDAISTELMQALDTALDDFIVSRETEGAALKTLIEQRLEGVSAEVVKVRAHMPNILQWQRERLLNKLEEAQVQLENTRLEQELVLMAQRIDVAEELDRLEAHVKETYNILKKKEAVGRRLDFMMQEFNRESNTLASKSINAEVTNSAIELKVLIEQMREQIQNIE

SEQ ID NO: 78037 - protein, 215 aa, Yersinia pestis
MKAYQREFIEFALNKQVLKFGEFTLKSGRISPYFFNAGLFNTGLDLAKLGRFYAAALMDCGVEFDLLFGPAYKGIPIATTTAVALAEHHERDVPYCFNRKEAKTHGEGGNLVGSPLQGRVMLVDDVITAGTAIRESMEIINAQGATLAGVMISLDRQERGRGEISAIQEVERDYHCKVIAIVTLNDVIRYLEDKPEMAEHLVAVRQYREQYGVTL

SEQ ID NO: 78038 - protein, 391 aa, Yersinia pestis
MKTLREFRAKVSVPIFLAILVAINGYLILSPLLYRAIAHSSDAINNFNTWKEALSFLELFEIPQFMIGLVLMLMAYALSMKTRTAWFLSVLLLFTLVAINIFIAKKYDSLTIYSIVIILALLFYWRRFDYYSLGSGTFFAVVSIASLIVYSMLGTLYMGDEFAPVVTDLSTAFYFAIVCMSTVGFGDIIPHTTVARMFTLTVIIAGITVFATSVASIAGPMISNNIKRIVKGRISHVERKNHFIIVGTNSLALNVYKGLRDRGDDVTVVCAVGSQHDFPSDADIIEGDPSSVATLKLAGAAKAKYIIVLCNNDADNTFTILAAKEISGEGTKILALVNETQNIEKVKRVNPDMVFSLPLLGSELLVRTLNGDTINNTLITEMFFGHCQKLD

SEQ ID NO: 78039 - protein, 313 aa, Yersinia pestis
MLDKIIRIATRQSPLALWQAHYVQHLLQANHPGLQIELVPMVTRGDIILDTPLAKVGGKGLFVKELELALLDGRADIAVHSMKDVPIAFPEGLGLVTICEREDPRDAFVSSHYAHLDDLPAGSVVGTSSLRRQCQLRERRPDLIIRDLRGNVGTRLAKLDNGDYQAIILAVAGLKRLGLENRIRYAMSAEESLPAVGQGAVGIECRLDDDHTRQLLAPLNHRHTELRVCAERAMNIRLEGGCQVPIGSYAELEGDTLWLRALVGAPDGSQMIRGERRGPAAEAEQMGIELADELLSRGAREILAAVYLDNPAR

SEQ ID NO: 78040 - protein, 453 aa, Yersinia pestis
MSTFITSLEKVILPFAIRIGRQQHVNAIKNGFIRLMPLTLTGAMFVLINNVFLSFGEGSFFFSMGVRLDGDTITMLNGWKAIGGNVYNGTLGIMSLMTPFFISMALAEEKKVDPLSAALLAIAAFMTVTPFSVGEAYAVGANWLGGANIISGIIIGLVVAEVFTFIVRRNWIIRLPDSVPTSVSRSFSALIPGFIILSIMGLISYTLALYGTNFHQIIIDSISAPLSKMGSVVGWVYVMFSSLLWFFGVHGAMALSALESGIMMPFALENVATYTQYGSVEAALAAGKEFHMWAKPFVDSYIFLGGTGATLGLIIAIFIASRREDYRQVAKLAAPASIFQINEPILFGLPVIMNPLMFIPFIMVQPILAIITSVAYYSGLIPPITNIAPWTMPAGLGAFFNTNGSIAALLLSLFNLGVATLVYLPFVIIANKAQGEIDRTVESEDDIANSLKF

SEQ ID NO: 78041 - protein, 115 aa, Yersinia pestis
MFDLSSIVDNEQTSDALEDVVMGLIINAGQARSLAYNALKQAKAGDFAQADELMAQSRSALNDAHLVQTQLIEADQGEGKTKVTLVLVHAQDHLMNAMLARELITELIELHQKIQ

SEQ ID NO: 78042 - protein, 105 aa, Yersinia pestis
MAEWNGEYVSPYAEHGKKSKQVKKITVSIPLKVLKILTDERTRRQVNNLRHATNSELLCEAFLHAFTGQPLPNDEDLRKERSDEIPEAAKILMRELGVDPDTWEY

SEQ ID NO: 78043 - protein, 222 aa, Yersinia pestis
MDEWYGQVAPREKLLKYGAAVLTDAELLAIFLRTGIPGMHVMKMAEYLIETFGSLHGLISADYQTLCAHKGIGASKYSQIQAIGELACRCFSSHLMRESVLLNPGITQKFLQNILSHREREIFLVVFLDNQHRVIRHEEMFTGTISSVEVHPREIVREALKVNAAALILAHNHPSGKAEPSQADRLITTQVIKACSLLDIRVLDHLVVGRGECVSFAERGWL

SEQ ID NO: 78044 - protein, 78 aa, Yersinia pestis
MSRVCQVTGKRPMSGNNRSHAMNATKRRFLPNLHSHRFWVEGEKRFVTLRVSAKGMRVIDKKGIETVLAEIRARGEKY

SEQ ID NO: 78045 - protein, 55 aa, Yersinia pestis
MAKGVREKIKLVSSAGTGHFYTTTKNKRTKPEKLELKKFDPVVRQHVLYKEAKIK

SEQ ID NO: 78046 - protein, 269 aa, Yersinia pestis
MPELPEVETSRRGIEPYLVGQTILYAVVRNARLRWPVSDEILTLSDQPVLSVQRRAKYLLLELPKGWIIIHLGMSGSLRVLSEETAAEKHDHVDLVVSNGKILRYTDPRRFGAWLWAKDLETSNVLAHLGPEPLSDEFTAQYLFDKSRNKRTLIKPWLMDNKVVVGVGNIYASESLFAAGILPDRAAGSLTDAESVLLVATIKAVLLHSIEQGGTTLRDFLQSDGKPGYFAQELQVYGRAGEPCRQCGHPIEIAKHGQRSTFFCRHCQH

SEQ ID NO: 78047 - protein, 246 aa, Yersinia pestis
MEPNTVIPKYNVRGFEIWGFRDMAQVLDHLLGSGPVKTGTLVAMNAEKLLKAEDDTALCELIKNAEYLYADGISMVRAIRRKYPQAELSRVAGADLWEALMQRAGQQGTPVFLVGGKPDVLAETEAKLRAQWNVNLVGSQDGYFTPEQREALFARIAASGAAIVTVAMGSPKQEIFMRDCRKFYPDALYMGVGGTYDVFTSHVKRAPKIWQNMGLEWLYRLLAQPSRIRRQLKLLKFVGYYYSGRL

SEQ ID NO: 78048 - protein, 454 aa, Yersinia pestis
MTLGQFGGLFCIYLIAVIFILTLTYQEFRRVKFNFNVLFSMLYLLTFYFGFPLTCMLVFQFGVAVVPVEYLLYAMLSATAFYGIYYVTYKTRLRQPRSQPRTPIFTMNRVETNLTWVLLALVAVGTVGIFFMQNGFLLFKLDSYSKIFSSDVSGVALKRFFYFFIPAMLVVYFLKQDRRAWFFFLASTVAFGILTYVIVGGTRANIIIAFSLFLFIGIVRGWITLWMLAAAGVFGIVGMFWLALKRYGLDVNGAEAFYTFLYLTRDTFSPWENLGLLLQNYDKIDFQGLAPIVRDFYVFIPSALWPERPDLVLNTANYFTWDVLDNHSGLAISPTLIGSLVVMGGVLFIPLGAIVVGLIIKWFDWLYEQGKAESNRYKAAILQSFCFGAVFNIIVLAREGLDSFVSRVVFFCVIFGACLVLAKLLYWLFDTAGLIKRQGIKSNRLSTPNAGNQL

SEQ ID NO: 78049 - protein, 321 aa, Yersinia pestis
MHVLIVKTSSMGDVLHTLPALTDAMNAIPGIRFDWVVEEGFSQIPSWHPAVDKVIPVAIRRWRKNWFGSDTRQERCDFKRVVQQRSYDRVIDAQGLIKSAALITRIAKGTKHGPDCKSAREPFASWFYNCRHEIDTKQHAVERIRQLFAKSLGYDKPESYGDYAIAQRFLNQLPADAGQYLVFLHATTRDNKHWPESHWVQLIELVQPTGLKIKLPWGAEHEHQRALRLAEHFPHVEVLPKLSLQQVAEVLAGAKAVVSVDTGLSHLTAALDRPNITLFGPTDPGLIGGYGKNQIAVISEQKKMDSLSAPTIMARLETLIS

SEQ ID NO: 78050 - protein, 461 aa, Yersinia pestis
MLKIFNTLSRQKEEFKPIHAGKVGMYVCGITIYDLCHIGHGRTFVAFDVVARYLRYLGYSLTYVRNVTDVDDKIIKRAIENNETCEQLTTRMLAEMHKDFDALNLERPDLEPRATHHIAEIIEMTERLIARGHAYVASNGDVMFAVDSDPDYGVLSRQDLDQLQAGARVEVADVKRNPMDFVLWKMSKPGEPRWESPWGPGRPGWHIECSAMNGKQLGAHFDIHGGGSDLMFPHHENEIAQSTCAHDGPYVNYWMHSGMVMIDKEKMSKSLNNFFTIRDVLAYYDAETVRYFLMSGHYRSQLNYSEENLKQARASLERLYTALRGTDANATPAGGAEFEARFRTAMDDDFNTPEAYSVLFDIAREVNRLKNEDMAAANGLAAELRKLAQVLGLLEQDPELFLQGGAQADDDEVAKIEALIKQRNDARSSKNWALADAARDQLNELGIVLEDGPQGTTWRRK

SEQ ID NO: 78051 - protein, 908 aa, Yersinia pestis
MVDAEPTRPNPDSLLAVANEKPRGRLKVFFGACAGVGKTYAMLQEAQRLRAQGLDVLVGVVETHGRSETAALLEGLTALPLKRIHHRNRQIREFDLDAALARRPALILMDELAHSNANGSRHPKRWQDVEELLDAGIDVLTTVNVQHLESLNDVVGGVTGIRVRETVPDHMFDEASEVVLVDLPPDDLRQRLNEGKVYIPGQAERAIEHFFRKGNLIALRELALRRTADRVDDQMRAFRDTQGRERVWHTRDAILLCIGHHAGNEKLVRTAARLAARLGCIWHAVYVETPRLHGLPEAKRRAILRTLKLAQELGAETATLSDPSEEQAVLRYAREHNLGKIIIGRRTEQHWKLRGSFADRLGKLGPDLDLVIIALDADPPTNVAKEPDSRPFTEKWRMQLRGCVAAIALCALITVLSLWLIPRFDQANLVMVYLLGVVIIALFYGRWPSVLAAVINVASFDLFFVQPHWSLAVTDVQYLLTFGVMLIVGIVVGNLTAGVRYQAKIARYREQRARHLYEMSRSLSRALTPEDIAKTSRHFLSSSFQAKTSLLLPQEEGHLQPIMPDDGGILSVDDAIAHWSFNQGAPAGAGTDTLPGVPYQLLPLTAAQQTYGVLAIEPANLRQLMVPEQQRLLQTFTSLIANALERLHLARSAELAKLDAEREQLRNSLLAALSHDLRTPLTVLFGQAEILTLDLAAEGSRHAPQANQIRQQVLSTTRLVNNLLDMARIQSGGFNLRKEWQSLEEIIGSALYMLETTLSQHQIRVELPDEMVLINCDASLLERVFINLLENAHKYAGHAALLGIRAEVQGEWLNVDVWDNGPGVTIGQENLIFDKFSRGNKESAIPGVGLGLAICRAIIDVHGGRIWVEKRQEGGASFRFVLPLEKVPEIDADNIDTNNIDTENNDIS

SEQ ID NO: 78052 - protein, 200 aa, Yersinia pestis
MSYLRPALVLLILLTLITGIAYPLLTTGLAHLMFSQQASGSLARLGDNVVGSTLIGQNFTQPGYFTGRPSATADRPYNPMASGGSNLASSNPALGQAIGERVKLQRQANPTQLGPVPVDLVTASGSGLDPHISLAAAYYQAPRIASIRQMPLSDVQQLIDNSMQKAIPSFFGEPVVNVLNLNMALDSHSHVKVPANPAKP

SEQ ID NO: 78053 - protein, 688 aa, Yersinia pestis
MTHKQRAIFEPALVRTALLDAVKKLDPRVQWRNPVMFVVYLGSWLTTLIWLDILSGHTTGSAMFTGSIALWLWFTVLFANMAEALAEGRSKAQAASLRGVKKTSWAKKLSEARVDAPQEKVSADSLRKGDLVLIEAGDTVPCDGEVLEGGASVDESAITGESAPVIRESGGDFSSVTGGTRVLSDWLVVECRVNPGETFLDRMIAMVEGAKRRKTPNEVALTILLVALTIVFLLATATLYPFSVFSVEASQAGSPVTITVLVALLVCLIPTTIGGLLSAIGVAGMSRMLGANVIATSGRAVEAAGDVDVLLLDKTGTITLGNRQASEFLPAPGVTEQQLADAAQLSSLADETPEGRSIVVLAKQRFNLRERDLHSLNATFIPFSAQTRMSGVNVQERMIRKGAVDAIRRHVESNQGHFPPAVDDLVASVARTGGTPLVVAEGSRVLGVVALKDIVKGGIKERFAELRKMGIKTVMITGDNRLTAAAIAAEAGVDDFLAEATPEAKLALIRQYQAEGRLVAMTGDGTNDAPALAQADVAVAMNSGTQAAKEAGNMVDLDSNPTKLIEVVHIGKQMLMTRGSLTTFSIANDVAKYFAIIPAAFAATYPQLNALNIMQLHSPSSAILSAVIFNALVIVFLIPLALKGVSYKAMSAAALLRRNLWIYGLGGLLVPFVGIKLIDLLLTALNMG

SEQ ID NO: 78054 - protein, 403 aa, Yersinia pestis
MSLPCNKHPFYQQLEQQLDTTRTEGLYKNERVITSAQQANIAVADGSRVINFCANNYLGLANHPKLIAAAKAGMDSHGFGMASVRFICGTQDIHKELEHKLASFLGMEDAILYSSCFDANGGLFETLLGPEDAIISDALNHASIIDGVRLCKAKRYRYANNDMTELEAQLKQAKAEGARHIMIATDGVFSMDGVIANLKRVCDLADEYQALVMVDDSHAVGVIGANGRGTHEYCEVMDRVDIITGTLGKALGGASGGYTAGRKELVEWLRQRSRPYLFSNSLAPAIVAASIEVLSLLEEGGALRDRLWANARLFREKMSAAGFTLAGADHAIIPVMLGEAKLAQDFANALLKEGIYVTGFFFPVVPKGQARIRTQMSAGHTTEQVERAIEAFVRIGKQLNVIA

SEQ ID NO: 78055 - protein, 341 aa, Yersinia pestis
MKALSKLKAEEGIWMTDVPQPELGHNDIMIKIRKTAICGTDVHIYNWDEWSQKTIPVPMVVGHEYVGEVVAIGQEVKGFNIGDRVSGEGHITCGHCRNCRGGRTHLCRNTVGVGVNRPGSFAEYLVIPAFNAFKIPDNISDELAAIFDPFGNAVHTALSFDLVGEDVLVSGAGPIGIMAAAVCKHVGARHVVIADVNEYRLDLARKMGVTRAVNVSKENLNDVMTELGMTEGFDVGLEMSGAPPAFRSLLNSMNHGGRIAMLGIPPSDMSIDWNQVIFKGLFIKGIYGREMFETWYKMAALIQSGLDLTPIITHRFPIDEFQQGFDAMRSGKSGKVVLSWD

SEQ ID NO: 78056 - protein, 376 aa, Yersinia pestis
MKVLTVFGTRPEAIKMAPLVHALAQDDAFESRVCVTAQHREMLDQVLRLFEIQPDYDLDIMRPGQGLTEITCRILEGLKPVLEEFKPDVILVHGDTTTTLSASLAGFYHRIPVGHVEAGLRTGDLYSPWPEEANRQLTGHLAMYHFAPTENSRQNLLREWVPENRIFVTGNTVIDALFWVRDRVMNTPDLRANLAQRYAFLDTNKKMILVTGHRRESFGGGFERICSALAEIARKHPEVQVVYPVHLNPNVSEPVNRILKGIDNIILIDPQDYLPFVYLMNHAYLILTDSGGIQEEAPSLGKPVLVMRDTTERPEAVDSGTVLLVGTNINKIVDAVTRLLTDETAYHQMTRAHNPYGDGYACQRILKALKNHQVTL

SEQ ID NO: 78057 - protein, 330 aa, Yersinia pestis
MSLTGTEKSAIMLMTLGEDHAAEVFKHLSSREVQQLSTTMASMRQVSHQQLVDVLAEFEDDAEQYAALSVNASDYLRSVLIKALGEERASSLLEDILESRETTSGMETLNFMEPQMAADLIRDEHPQIIATILVHLKRAQAADILALFDERLRNDVMLRIATFGGVQPAALAELTEVLNNLLDGQNLKRSKMGGIRTAAEIINLMKTQQEETVMDAVREYDGELAQKIIDEMFLFENLVSVDDRSIQRLLQEIDNESLLIALKGADQALRERFLSNMSLRAAEILRDDLATRGPVRMSLVENEQKSILLIVRRLAESGEIVIGGGEDIYV

SEQ ID NO: 78058 - protein, 353 aa, Yersinia pestis
MSTDKTGSTNNEPSVDNELDIRGLCRTLWRGKVWIIGMAIIFAAIALGVSYLVKQQWSATAITDKPTVNNLGGYYSQQQFLRNLDIRLNSGLVSEQPGISDEAYGEFITQLAAYDTRRDFWLQSDYYKQRLEGDAKADAALLDELVNNIVFTARDDKKIPNDSIKLTAETASDANKLLRGYIDFASQRASSHLNDEIQGAWAARTQSMKAQVKRQEAVAQAVFDREVAAVKQALKVAGQQGITSSQTDTPAEQLADSKMFMLGKPMLEARLETLLATGPSFDIDYDQNRAMLATLNVGPTLDDKFQTYRYLRTPEDPVTRDSPRRVFLLIMWGAIGALVGAGVVLVRRSSKAL

SEQ ID NO: 78059 - protein, 144 aa, Yersinia pestis
MLQEIMQFISQHPILSLAWVLLFGAVVFTSFKNSLSKVKEVTRGEATRLINKEDAVVVDIRTREDYRKGHIANSINLIPSDIKNGNLGELEKHKTQPIIVVCAMGTTSRASADMLSKAGFERVFTLKEGISGWSGENLPLARGK

SEQ ID NO: 78060 - protein, 365 aa, Yersinia pestis
MNLLTMSTELIYIFLFSMAFLFVARKVAIKIGLVDKPNYRKRHQGLIPLVGGISVFAGVCFAFLITNQQIPHFRLYLACAGLLVFVGALDDRFDISVKIRAFVQALVGIAMMAVAGLYLRSLGHAFGPWEMVLGPFGYVVTLFAVWAAINAFNMVDGIDGLLGGLSCVSFGAMGILLYQSGQMSLALWCFAMIATIIPYILLNLGLLGRRYKVFMGDAGSTLIGFTAIWILLQATQGNAHPINPVTALWIIAIPLMDMIAIMYRRLRKGMSPFSPDRQHIHHLIMRAGFTSRQAFVLITLAAALLAMIGVIGERLTFIPEWVMLALFLLAFLLYGYCIKRAWRVARFIKRFKRRMRRASKNKHES

SEQ ID NO: 78061 - protein, 212 aa, Yersinia pestis
MMNFKNVFRWHLPFLLLLGLFSLRAAATDTLLILGDSLSAGYRLPIAQAWPSLLDKKWQATPSLPKVVNASISGDTAAQGLARLPALLKQHQPRWVLIELGANDALRGFPTQDIQRDLSEIINQITAAKAQPLLMQIRIPPNYGRRYTDAFTAIYPQLAQQFDIPLLPFFMEQVAVKPEWMQDDGLHPNGDAQPFIADWMAQQLKPLVVDPK

SEQ ID NO: 78062 - protein, 82 aa, Yersinia pestis
MAKIEMYTKATCPFCHRAKALLNAKGAAFHEIAIDNDPAKREEMIARSGRTTVPQIFIDGQHIGGCDDLHALDARGGLDPLL

SEQ ID NO: 78063 - protein, 419 aa, Yersinia pestis
MNLTELKNTPVSDLITLGENMGLENLARMRKQDIIFSILKQHAKSGEDIFGDGVLEILQDGFGFLRSADSSYLAGPDDIYVSPSQIRRFNLRTGDTVAGKIRPPKEGERYFALLKVNEVNYDKPENARNKILFENLTPLHANSRLRMERGNGSTEDLTARVLDLASPIGRGQRGLIVAPPKAGKTMLLQNIATSIAYNHPDCVLMVLLIDERPEEVTEMQRLVKGEVIASTFDEPASRHVQVAEMVIEKAKRLVEHKKDVIILLDSITRLARAYNTVVPASGKVLTGGVDANALHRPKRFFGAARNVEEGGSLTIIATALVDTGSKMDEVIYEEFKGTGNMELHLSRKIAEKRVFPAIDFNRSGTRKEELLTTTDELQKMWILRRILHPMGEIDAMEFLISKLATAKTNDQFFDNMRRS

SEQ ID NO: 78064 - protein, 291 aa, Yersinia pestis
MKHKISFCPGVGSAAHIIQHSELLLTSVYIEHPLLIMVNRGYKIIRWENQECVILPGEIAVINSGQTIDIINGLSNDDLFFSQQLHCDPSLIAAFAHHPTSADLGVIPGVMAIRNLAPEFINTFGNIFNSISENSDIPTVIIKHRMLELLLWLAQRDVKFILNDGNGLSEKVRRCLASDPHKIWSASEVAEHMTMSEVVLRRKLAAENILLRDLMIDVRMTSALRLLQGTDWPISLIANQIGYESSSRFAERFRKRFGFAPTAIRGHHRLQPVESESPIHSVNRYLKPSYS

SEQ ID NO: 78065 - protein, 245 aa, Yersinia pestis
MKIDLNADLGEGCANDQALLQLVSSANIACGFHAGDAQTMRQSVRWALEYGVAIGAHPSFPDRENFGRTAMQLPPETVYAQVVYQLGALAAIVQVEGGVMQHVKPHGMLYNQAAVDPLLADAIAQAVKAVDPSLRLVGLAGSELIRAGTRVGLVTRQEVFADRHYQPDGTLVPRSQPDALIESDELALSQTLAMVQQHQVQACDGSWVQVQADTVCVHGDGVQALAFARCLRDRFQQEGISVIAQ

SEQ ID NO: 78066 - protein, 673 aa, Yersinia pestis
MRLNPSQQEAVEFVTGPCLVLAGAGSGKTRVITNKIAHLIRQCGYQPKHIAAVTFTNKAAREMKERVAQTLGRKEARGLMIATFHTLGLEIIKKEYVALGMKSNFSLFDAQDQMGLLKDLTHKWLEDDKTLLQQLVSAISNWKNDLLDPAAAAATARSERDKLFVHCYGLYDAHLKACNVLDFDDLISLPTLLLQKNLEVRERWQNRLRYLLVDEYQDTNTSQYQMVKLLVGNRARFTVVGDDDQSIYSWRGARPQNLVLLNEDFPALRVIKLEQNYRSSGRILKAANILIANNPHVFEKKLFSELSYGDELKVITANNEDHEAERVVGELIAHHFVKKTQYSDYAILYRGNHQSRLFEKLLMQNRIPYRISGGDSFFSRPEIKDLLAYLRVLTNQDDDSAFLRIVNTPKREIGAATVQKLGEWANLRNKSLFRASFDLGLGEHLKGRGLESLQRFTHWMDGIIRLVEREPVAAVRDLIHGIDYESWLFETAPSPKAAEMRMKNVNLLFSWMTEMLEGSELDEPMTLTQVVTRFTLRDMMERGESDEELDQVQLMTLHASKGLEFPYVFLVGMEEGLLPHQSSIDEDNVDEERRLAYVGITRAQRELFFTLCKERRQYGELIRPEPSRFLMELPQDDLNWENERKAVSPEERMQKGQSHLANLRAQLANAKKP

SEQ ID NO: 78067 - protein, 75 aa, Yersinia pestis
MHLIPQRSYKIIGFSPEISPAYRQKLLSLGMLPGSSFNVVRLAPLGDPIQIETRRVSLVVRKKDLDLLTLDLQPQ

SEQ ID NO: 78068 - protein, 791 aa, Yersinia pestis
MNEPLSRIIASELQARPEQVISAIRLLDEGNTVPFISRYRKEVTGGLDDIQLRQLESRLGYLRELEDRRQTILKSIEDQGKLTDQLAGAINATLSKTELEDLYLPYKPKRRTRGQIAIEAGLEPLAERLWQDPQQDPEHTALAYVDADKGVADTKAALDGARYILMERFAEDATLLAKVRQYLWKNAHLVSKVVEGKEQEGAKFRDYFDHHEPIAQVPSHRALAMFRGRNEGVLQLALDPDPQFDEPPRESQGEQIIINHLDLRLNNAPADGWRKAVVNWTWRIKVLLHLETELMSTLRERAEDEAINVFARNMQDLLMAAPAGMRATMGLDPGLRTGVKVAVVDATGKLVAFDTIYPHTGQAAKAAAVVAALCIKHQVELVAIGNGTASRETERFFVELQQQYPAVTAQKVIVSEAGASVYSASELASQEFPDLDVSIRGAVSIARRLQDPLAELVKIDPKSIGVGQYQHDVSQSQLAKKLDAVVEDCVNAVGVDLNTASVPLLTRVAGLTRMMAQNIVNWRDENGRFRNREQLLKVSRLGPKAFEQCAGFLRINHGDNPLDASTVHPEAYPVVERILAATEQALQDLMGNANALRNLNARDFTTERFGVPTVTDILRELEKPGRDPRSEFKTATFAEGVETLNDLTPGMILEGAVTNVTNFGAFVDIGVHQDGLVHISSLADKFVDDPHKVVKAGDIVKVKVMEVDLQRKRIALTMRLDEQPGETHSRRSNNGTGSERTNNDNRGVNRPHNDAKGHNAPNRAPAKGRSDSSSAGNSAMSDALAAAFKKR

SEQ ID NO: 78069 - protein, 450 aa, Yersinia pestis
MKWWRFSPRSSFARTLLLIVTLLFVSLVTTYLVVLNFAILPSLQQFNKVLAYEVRMLMTDRLQLEDGTLLEVPPAFRREIYRELGISLYTNAAAEESGLRWAQHYKFLSDQMAQQLGGPTDVRVEVNKNSPVVWLKTWLSPDIWVRVPLTEIHQGDFSPLFRYTLAIMLLAVGGAWLFIRIQNRPLVELEHAALQVGKGNIPPPLREYGASEVRSVTRAFNQMAAGVKLLSDDRTLLMAGVSHDLRTPLTRIRLATEMMSEDDAYLSESINKDIEECNAIIEQFIDYLRTGQEMPTEPSDLNSVLGEVIAAESGYERVIETDLAEGEVLVDIHPLSIKRALTNMVVNAARYGNGWIKVSSGKELQRAWFQVEDDGPGIKPEDLKHLLQPFVRGDSARSTSGTGLGLAIVQRIIDAHAGSLEIGTSKRGGLRIRAYIPLPLDVKPKPPAVA

SEQ ID NO: 78070 - protein, 539 aa, Yersinia pestis
MSVKGITPQELAAYGIHNVSEIVYNPSYDLLFEEETKPTLEGYERGTLTTTGAIAVDTGIFTGRSPKDKYIVRDAITQDTVWWADQGKGKNDNKPLSQEIWNHLKGLVTEQLSGKRLFVVDTFCGANADTRLQVRFITEVAWQAHFVKNMFIRPSDEELARFEPDFIVMNGAKCTNPQWKEQGLNSENFVAFNLTERMQLIGGTWYGGEMKKGMFSMMNYLLPLKGIASMHCSANVGEKGDVAIFFGLSGTGKTTLSTDPKRKLIGDDEHGWDDDGVFNFEGGCYAKTIKLSEEAEPDIYHAIKRDALLENVVVLADGTVDFNDGSKTENTRVSYPIYHIDNIVKPVSKAGHATKVIFLTADAFGVLPPVSRLTANQTQYHFLSGFTAKLAGTERGVTEPTPTFSACFGAAFLSLHPTQYAEVLVKRMQAVGAQAYLVNTGWNGTGKRISIKDTRAIIDAILNGEIDKAETFTLPIFDLAVPMALPGVNPDILDPRDTYADKAQWQEKAEDLAKRFATNFDKYTDTPAGAALVSAGPKI

SEQ ID NO: 78071 - protein, 293 aa, Yersinia pestis
MSNHDQLHRYLFANHAVRGELVSVNETYQQVLANHDYPPAVQKLLGEMLVATSLLTATLKFDGDITVQLQGGDGPLTLAVINGNNRQEMRGVARVKGEISDDSTLQEMVGNGYLVITITPAQGERYQGVVALEGETIAACLENYFMQSEQLPTRLFIRTGHVADKAAAGGMLLQVLPAQERNEDEFDHLAQLTATIKAEELFTLPANEVLYRLYHQEEVTLYEPQNVSFRCTCSRQRCADALVTLADDDVTEMLEQDGNIDMHCEYCGNHYLFDAVDIATLKNGNSASSEQIH

SEQ ID NO: 78072 - protein, 135 aa, Yersinia pestis
MKDKISPAESVRLDKWLWAARFYKTRAIARDMVDGGKVHYNGQRSKPSKLVELHAEIRLRQGNDERTVRVLALHSQRRGAEEAQTLYEETEASIANREKVAQARKLNALTMPHPDRRPDKKERRNLIKFKQGEPE

SEQ ID NO: 78073 - protein, 339 aa, Yersinia pestis
MNTNPASMAVIGAGSYGTALAITLARNGHQVVLWGHDPKHIQQLQQDRCNRAFLPDAAFPDTLRLETDLACALAASRDVLVVVPSHVFGAVLHQLKPHLRKDARIVWATKGLEAETGRLLQDVAREVLGEAIPLAVISGPTFAKELAAGLPTAIALASTDVQFSEDLQQLLHCGKSFRVYSNPDFIGVQLGGAVKNVIAIGAGMSDGIGFGANARTALITRGLAEMTRLGTALGADPSTFMGMAGLGDLVLTCTDNQSRNRRFGIMLGQGLGVKEAQDNIGQVVEGYRNTKEVLALAQRHGVEMPITEQIYQVLYCHKNAREAALTLLGRTKKDEKIGI

SEQ ID NO: 78074 - protein, 273 aa, Yersinia pestis
MSSEELEQVWSNIKSEARALAECEPMLASFFHATLLKHENLGSALSYILANKLANPIMPAIAIREVVEEAYRSDAHMIVSAARDILAVRLRDPAVDKYSTPLLYLKGFHALQAYRIGHWLWAQDRKALAIYLQNQVSVAFGVDIHPAATIGCGIMLDHATGIVIGETAVVENDVSILQSVTLGGTGKTSGDRHPKIREGVMIGAGAKILGNIEVGRGAKIGAGSVVLQSVPAHTTAAGVPARIVGKPESDKPSLDMDQHFNGSIQGFEYGDGI

SEQ ID NO: 78075 - protein, 162 aa, Yersinia pestis
MLNIVLFEPEIPPNTGNIIRLCANTGCQLHLIKPLGFTWDDKRLRRAGLDYHEFADIKHHHDYQAFLDSEKLDSTQPARLFALTTKGTPAHSAVSYQANDYLLFGPETRGLPAYILDALPAQQKIRIPMQADSRSMNLSNAVSVVVYEAWRQLGYPGALLKE

SEQ ID NO: 78076 - protein, 176 aa, Yersinia pestis
MKKITLAIALFSASTTVAMSASNNTITFQGEVTAQTCSVTVNGLEANPVVLLPTVSSSDLDASGQTKGKTTFTLGVSGCTSGSDDLDIKTVFIGSLVTATGNLQNTGTAGNVELQLLKDATTTTGIDLNSGLAQDGIVLLAGDTSAEHDFAVQYYATGQSTPGSVIASVQYAVSYL

SEQ ID NO: 78077 - protein, 961 aa, Yersinia pestis
MLQTTLLALQGLSCMNCAQRVKAALESREDVHHAEVNVHYAKVTGEADTHALIETIKQTGYQATEAQTPDVELHLSGLSCGHCTETVRKALEAVSGVISADVTLESANVYGKADIQTLIAAVEQAGYHATQQGIDSPKTEPLTHSAQSQPESLAAAPNTVPATNVALATSTVSDTNTVLPTNTALPTNTTSTTSTADTASATSTAPVINPLPVTESVAQPAASEGESVQLLLTGMSCASCVSKVQNALQRVDGVQVARVNLAERSALVTGTQNNEALIAAVKNAGYGAEIIEDEGERRERQQQMSQASMKRFQWQAALGLLLGIPLMAWGLFGGSMTLTPETQTPWLIIGIITLLVMIFAGGHFYRNAWVSLKNGRATMDTLVALGTGAAWIYSITVNIWPDVFPMEARHLYYEASAMIIGLINLGHAMEQRARQRSSNALERLLDLAPPTAKLVTDDGEKVIPLADVQLGMILRLTTGDRVPVDGEIVQGEVWMDEAMLTGEPIPQQKSVGDIVHAGTQVQDGTVQFRASAIGSQTTLARIIKLVRQAQSSKPEIGKLADRISAVFVPTVVVIAIVAGLIWYFFGPQPQLVYTLVVATTVLIIACPCALGLATPMSIISGVGRAAEFGVLVRDADALQQASNLDTLVFDKTGTLTEGHPQVVAIHTFNGVSEQQALGWAAALETGSNHPLARAILQRAEGLTLATASQFRTLRGLGVSGEVDGIPLLLGNNRLLEEQQIDTRELQSLIQQQAESGATPVILTANGKPAALLSIRDPLREDSIGALQRLHQLGYSLVMLTGDNPITANAIAKEAGIDRVIAGVLPDGKADAIKQLQAAGHKVAMIGDGINDAPALAQADVGIAMGGGSDIAIETAAITLMRHSLYGVVDAVELSKATLRNMKQNLLGAFFYNALGIPIAAGILYPFTGTLLSPVVAGAAMALSSITVVSNANRLLRFKPKQ

SEQ ID NO: 78078 - protein, 232 aa, Yersinia pestis
MHKILLVDDDRELTSLLKELLEMEGFNVVVAYDGEQALSQLDSSIDLLLLDIMMPRKNGIETLKELRQHHQTPVIMLTARGSELDRVLGLELGADDYLAKPFNDRELVARIRAILRRSNWSEQQQNAEQGAPTLEVDCLQLNPGRQEASFEGQPLELTGTEFTLLYLLAQHLGQVVSREHLSQEVLGKRLTPFDRAIDMHISNLRRKLPDRKDGLPWFKTLRGRGYLMVSET

SEQ ID NO: 78079 - protein, 269 aa, Yersinia pestis
MDKLLRRIAKFLGIITPTTYAYPALDITLPGERHLHLVGSIHMGTAGMFPLPHTLLNKLNQADALIVEADITDATSSFGHSTVTEPLVDRLSEEYYPQLQRRCEELGSDPLAMTYLPAWQVALMLQAHQAQRLGLRGEYGIDYQLLKAAGAQEKEIIELEGAEMQLDLLKTLPDNGISLLHDTLLHWHTNARLLQTMIGWWLEHQPEKYQATLAPTFSHDMYDVLMLQRNKRWQQQLEQLAPGRYVVAVGALHLYGEGNLPELLRADNQ

SEQ ID NO: 78080 - protein, 162 aa, Yersinia pestis
MRKVTTLVMASMFVLGSSAAFAADNTKVTEGYHGDGKMMMNKKGDRGHHNMFDGINLTEQQRQQMRDLMRQSHQSQPRLDLEDREAMHKLITADKFDEAAVRAQAEKMSQNQIERHVEMAKVRNQMYNLLTPEQKEALNKKHQERIEKLQQKPAAQPSSAQK

SEQ ID NO: 78081 - protein, 253 aa, Yersinia pestis
MSTIDIKKLTKQFKGQQVLHGIDLEVNSGEVVAIIGPSGSGKTTLLRCINLLEIPDSGIIRVGNIEINGSIHISKQQRQVRALRQQVGFVFQGFNLFPHRTVLENIIEGPVIVKGEVRGSAEKRGRELLAKVGLSGKEDTYPRRLSGGQQQRVAIARALAMQPQVILFDEPTSALDPELVGEVLSTIRALAEEKRTMVIVTHEMSFARDVADRAIFMDHGQIVEQGPAKALFSHPQHDRTKQFLDKFLNNPDC

SEQ ID NO: 78082 - protein, 404 aa, Yersinia pestis
MTDRSDTGCQQPVNVSVKRTSFSILGAISVSHLLNDMIQSLILAIYPLLQAEFSLSFAQIGLITLTYQLTASLLQPLIGLYTDKHPQPYSLPIGMGFTLSGILLLAVATTFPVVLLAAALVGTGSSVFHPESSRVARMASGGRHGLAQSVFQVGGNFGSALGPLLAAIIIAPYGKGNVGWFSLAALLAIVVLLQVSKWYKLQQRASYGKVLKISSAKTLPKNKIISTLAILMVLIFSKYFYLTSISSYYTFYLIHKFGVSVQSAQIHLFVFLFAVAAGTIIGGPLGDKIGRKYVIWGSILGVAPFTLALPYASLYWTGILTVFIGVILASAFSAILVYAQELIPGKVGMVSGLFFGFAFGMGGIGAAVLGYVADLTSIELVYQICAFLPLLGIFTALLPNLDDK

SEQ ID NO: 78083 - protein, 563 aa, Yersinia pestis
MHHSTPLITTIVGGLVLAFLFGTLAHRLRISPLVGYLAAGVLAGPFTPGFVADTSLAPELAEIGVILLMFGVGLHFSLKDLLAVKSIAIPGAIAQIAVATLLGMGLSHFLGWDLITGLVFGLCLSTASTVVLLRALEERQLIDSQRGQIAIGWLIVEDLAMVLTLVLLPAFAGVMGNETTNLNQLFTELAITIGKVIAFITLMIVVGRRLVPWILAKTASTGSRELFTLAVLVLALGIAYGAVELFDVSFALGAFFAGMVLNESELSHRAAQDTLPLRDAFAVLFFVSVGMLFDPMILVNEPLAVIASLAIIIFGKSAIAFALVRLFGHSKRTALTISVSLAQIGEFAFILAGLGISLGLLSGHGRNLVLASAILSIMLNPLLFTLLDRYLAKTETMEDLILEEAVEEEKQIPVDLCNHVLLVGYGRVGSLLGAKLHAEGIPLVVIENSRPRVEALREQGINAVFGNAANADVMALGRLDCARWLLLTIPNGYEAGEIVASARIKRPDLEIIARAHYDDEVVYISDRGANQVVMGEREIANSMLNMLKIETLTEEDKMPVCPI

SEQ ID NO: 78084 - protein, 434 aa, Yersinia pestis
MKFPGKRKSKHYFPVNARDPLLQSVQAENEVSTSYIVGIDQTLVDIEAKVDEDFITRYGLSQGHSLVIEDDVAERLYQELTHNDLITHEFAGGTIGNTLHNYSVLADDRSVLLGTMCSNIKIGSYAYRYLCNTSSRTDLNYLQAVDGAIGRCFTLITENGERTFAISPGQMNQLRPESIPEEVIAGASALVLTAYLVRCKPGEPMPDATMQAIHYAKKHDVPVVMTLGTKYVIADNPQWWREFLNEHVSILAMNEDEAYELTGLNDPLMASDMALEWVDLVLCTAGPSGLYMAGYTEEAYKRQTQHPLLPGAIAEFNLYEFSRAMRKAHCVDPFRIYSHIAPYMGGPEKIMNTNGAGDGALSAVLHDITANGYHRNNVPNSSKHVRSYLSYSSLAQVCKYANRVSYQVLNQHSPRLTRGLPEREDSLEESYWER

SEQ ID NO: 78085 - protein, 507 aa, Yersinia pestis
GLRKLAQAKQGEIDVINQSIAKLKTEEMGLLMQQQRVNADLETAKITEPQRVENARLTAEAAEKAARDRRISEEIAATEAKRQRMENERLAEQERQRVEGTKQQVSEASCAQQASAWQNRFTLPALQPSGSAQYSFAASGMSAVGEAAELHNSFLAAQEQLSAIATISASGSVAAMIALGIYQTKVGESSERPPGWNVSPKFVGSISLSAMGLPATESLASQGEMALPVRMRIIDAKDWIGCTEIYAVKTGVAGVLPKVKVGAAQYDESTGVYTFTTDSTPPRTLIFTPAQPPGAETRPILAPPGSTPATLQHTGEMIIKPVITPTILPLPQLYARDFHDYIIWFPADSGLEPVYVYLNSPYGKTTAKGKYSGRDFNPDKAGGPIKNLDWKEIKIRGEGVDEVKLHTRRFGELEDNKLMIERLEKILTNKLTATDIDKRFYTHEIRELERYRMLGIPDDVNDKSVWNDAHTATLEDFKINEKTQPLYTSEAEDAYIKAELKNSLGSK

SEQ ID NO: 78086 - protein, 282 aa, Yersinia pestis
MFVPFLIMFREGLEAALIVSLIASYLKRTQRGQWMGAVWVGVVVAAVLCLAIGIFINETTGEFPQKQQELFEGIIAVVAVCILTYMVFWMRKVSKSVKVHLEGAIDNALNSGRGQGWALVAMVFFAVAREGLESVFFLLAAFQQDVGIGAPIGAILGLVCAILVGMAIYWGGVKLHLAKFFKWTSLFILFVAAGLAAGAIRAFHEAGLWNHFQDIAFDLTDVLSTHSLLGTFLEGMFGYQEAPTVSEVSVYFIYLIPALILFFLPPRSTAGSAIAAARKINP

SEQ ID NO: 78087 - protein, 434 aa, Yersinia pestis
MRDKTGPKFGPYQPDDEAVSPSRRRLILGMGMVSGALVLGGAKTAQAADCRSPDVAGTQDERWQKQPFYGQHQAGVLTPQQAAMMLVAFDVLATDKTSLIRLFKLLTERLAFLTTGGRAPSVNAKLPPLDSGIMGPEIYPDNLTVTVSVGNALFDERFGLQGQKPLRLQRMTRFPNDSLDAGLCHGDVMLQICANTNETVIHALRDIIKHTPDLLSVRWKREGFISAHAARSKGQDTPINLLGFKDGTANPKISNKPLINNVVWVSNNAGEPAWAVGGSYQVVRIIRFKVEFWDRTPLQEQQTIFGRDKNSGAPLGMQHEHDEPNYAKDPEGKVIPMDAHIRLANPRTIETQRNLMLRRGYSYSLGVSNSGQLDMGLLFVCYQSDLAQAFLTVQERLNGEALEEYVKPIGGGYFFTLPGVADANHYLAQSLLEA

SEQ ID NO: 78088 - protein, 851 aa, Yersinia pestis
MKFVKYFLILAVCCILLGAASIFGLYKYIEPQLPDVATLKDIRLQTPMQVYSAEGELIAQFGEKRRIPLTLNQIPPEMVHAFIATEDSRFYDHHGVDPVGILRAVSIAMLSGRASQGASTITQQLARNFFLSPERTLMRKIKEAFLAIRIEQMLTKDEILELYLNKIYLGYRAYGVGAAAQVYFGKEVHELTLSQIAMIAGLPKAPSTFNPLYSHDRAVARRNVVLLRMLDEKYITQAQYDQARSEELVANYHVPQIAFSAPYLAEMVRQEMIKRYGENAYTDGYQVYTTITRKLQLAAVDSLRANVLAYDMRHGYRGPSNVLWKVGESAWSREQIIDSLKALPVYGPLLPAVVTEADAAQATAMLADGSNVTLPMVGIRWARPFKSDNAQGPVPKKATDVVQPGQQIWVRKVDDNWWLAQVPDVNSALVSIDPNNGAIKALVGGFDFNQSKFNRATQALRQVGSNIKPFLYTAAMDKGLTLATILNDLPITRWDSGAGTDWRPKNSPPTYDGPIRLRQGLGQSKNVVMVRAMRAMGVDYAAEYLQRFGFPAQNIVHSESLALGSASFTPLQLVRGYAVLANGGYLVDPYFITKITDDVGNVLFETKPKVVCDNCNLPVIYGDTQRSVVLSDDNIENVATSQNQNASNVPMPELEQVTPAQTTLNSEQQYAPHVISTPLAFLMRDALNSNIFGEPGWMGTGWRAGRDLKRKDIGGKTGTTNSSKDAWFSGYGPDTVTSVWIGFDDHRRNLGRSTASGAIPDQISGAEGGAKTAQPAWNDFMKVALEGLPEKQVPPPPGIVSVVIDKQTGKLSNGGPGSRSEYFIDGTQPTEHTVHEVGTTLMDNGQTHELF

SEQ ID NO: 78089 - protein, 313 aa, Yersinia pestis
MDTFFYSVSTWRSIKMYSQYWQVGLDIQMEAIRALAVIRRRNGWQLRYWWHKILPSGVLREGILHQPDILSEQLKLLRKQLPRHISLRIALPAQRILQHTIHVPDRRLREPERDGFIKASASRLFPVNSQALALDYCRETVASSELLITAARQSEVQQWQACLEQAGLSSQVIDIAPCALRYMATATGLSGPYWLVHRLANEWLWVSSSDMPFHSGVVAIETECRTQENDIRLLSALLAQLNMRGAGEDGAPLPVYYSSVVKESLPENTRSWSPLTAFAHYQPPLPALPAAFTLAGGLAVRAADSLSAAGAGY

SEQ ID NO: 78090 - protein, 327 aa, Yersinia pestis
MVKKIGVLTSGGDAPGMNAAIRGVVRAALSAGLDVFGIEDGYLGLYENRMKKLDRYSVSDMINRGGTFLGSARFPEFRDPEVRKVALKNMHERGIDGLVVIGGDGSYAGADLLTKEGGIHCVGLPGTIDNDVAGTDYTIGFFTALETVVEAIDRLRDTSSSHQRISIVEVMGRYCGDLTLAAAIAGGCEFIAIPEVEFKRDDLVAEIKAGIAKGKKHAIVAITEKLDDIDSLAKYIEKETGRETRGTVLGHIQRGGAPVAYDRILASRMGAYAVDLLLQDHDYKKGGFCVGVQNEKMVHELISVCIAPENKKSKFKEDWYDTAKKLF

SEQ ID NO: 78091 - protein, 644 aa, Yersinia pestis
MFQDNPLLAQLKQQLHTQTPRVEGVVKGTEKGFGFLEVDGQKSYFIPPPQMKKVMHGDRIIATLHTDKDREIAEPETLVEPFLSRFVGRVQRKDDRLSIVPDHPLLRDAIQCRPVRELTHSFQNGDWAVAEMCRHPLKGDRAFQADLTAFITNGEDHFVPWWVTLARHNLEREAPAMVESALNDAELEREDLTALNFVTIDSASTEDMDDALFVQDNGDGSWLLTIAIADPTAYVVENSELDLTARKRAFTNYLPGFNIPMLPRDLSDNLCSLRPNERRPVLVCRVTITEEGTLSNDIRFSAAWVESKAKLVYDDVSDWLEGNNRWQPQDTAIAEQITLLKRICDARSNWRQQHALVFKDRPDYRFLLGEKGEVLDIIVEHRRIANRIVEECMIAANVCAALALREHLGFGIYNVHTGFDPALVEQAASVLKANGVGADPQALLTLPGFCELRRHLDALPTQFLDSRIRRFQTFAEISTVPGPHFGLGLEAYATWTSPIRKYGDMVNHRLLKAMITGQQAEKPQEEITVQLAERRRLNRMAERDVGDWLYARYLQPQAGTDTRFTAEIIDITRGGLRVRLLDNGAVAFIPAPFIHAVRDEVVCSQETGTVQIKGETVYSQSDKIEVRIAEVRMETRNVIARPVA

SEQ ID NO: 78092 - protein, 492 aa, Yersinia pestis
MANYFNTLNLRQQLAQLGKCRFMARDEFADEAGYLKGKKVVIVGCGAQGLNQGLNMRDSGLDVAYALRKEAIAEKRASWRKATENGFKVGTYEELIPQADLVVNLTPDKQHSAVVKAVQPLMKEGAALGYSHGFNIVEVGEQVRKDITVVMVAPKCPGTEVREEYKRGFGVPTLIAVHPENDPKGEGMAIAKAWAAATGGHRAGVLEFSFVAEVKSDLMGEQTILCGMLQAGSLLCFDKLVSEGTDAAYAEKLIQFGWETITEALKQGGITLMMDRLSNPAKLRAYALSEQLKEIMAPLFQKHMDDIISGAFSSGMMADWANDDVKLLNWREETGRTAFENAPQFEGKISEQEYFDHGVLMIAMVKAGVELAFETMVDSGIIEESAYYESLHELPLIANTIARKRLYEMNVVISDTAEYGNYLFANAAVPLLKEKFMDSLQAGDLGKSIPGSAVDNAQLRDVNEAIRNHPIEAVGHKLRGYMTDMKRIAVAG

SEQ ID NO: 78093 - protein, 247 aa, Yersinia pestis
MKISIITATYNSERTISDTLSSLEKQTYLDVEYIIVDGASKDNTLTVISQNSTRVTKIISESDQGIYDALNKGIDLATGDIIGFLHSDDLLAYPGALSDIVETFEKQQCDAVYGDLQYVAKNDLNKVIRCWKSGFFNHEKMKYGWMPPHPTFYMKRDLYIRFGGFDLSYKISADYDSLTRYIINYKIKIAYLPKVIIKMRVGGISNRSLGSMLLKSKEDIQIMKLRGLFWPMSFLCKNLSKLPQFLK

SEQ ID NO: 78094 - protein, 348 aa, Yersinia pestis
MLLTDLGNVILPRARSAMEELTRIPALLRRLQQRDDEGIEDLEPTWLFNERRLQIFLSLYRQQHALHVAQALDITQSAVSAALKVLEKGAGMYLFHRTPKGMLPTPAGHEIAPCISRALNALHHIPEEITAHRGDLTGSVRVGALPLSRARLLPQAMIKLISRHPGIKIVTNESGFTALIAELRAGDIDFIIGALRNEKMLLDIHSEILFEEELILLARPNHPLSDRRVKNQELKDIQWVLPRNHAPSRHLLEVAFCKMGLASPQPVVESGDPAVVRALLLGSDMVAAVSSHQLDFEVSEGILIPLQVNLTGTRREIGLMTRQKALNSPATDALINCVREVIQSSNDK

SEQ ID NO: 78095 - protein, 616 aa, Yersinia pestis
MPKYRSHTTTHGRNMAGARALWRATGMTDDDFGKPIIAVVNSFTQFVPGHVHLRDLGKLVAEQIVASGGVAKEFNTIAVDDGIAMGHGGMLYSLPSRELIADSVEYMVNAHCADAMVCISNCDKITPGMLMASLRLNIPVIFVSGGPMEAGKTKLSDKIIKLDLIDAMIQGANPNVSDEESAQIERSACPTCGSCSGMFTANSMNCLNEALGLALPGNGSLLATHADRKQLFLDAGKHIVALTKRYYEQDDVSALPRNIANKAAFENAMILDIAMGGSTNTVLHLLAAAQEGEIDFSMTDIDHLSRKVPHLCKVAPSTQKYHMEDVHRAGGVIGILGELDRAGLLNRDVSNVLGLNLTQTLEAYDVMLTQDEGVKQMYAAGPAGIRTTKAFSQDCRYPSLDTDREEGCIRTREHAYSQDGGLAVLYGNIAADGCIVKTAGVDKDSLTFRGPAKVFESQDEAVEAILGGKVVAGDVVVIRYEGPKGGPGMQEMLYPTTYLKSMGLGKSCALLTDGRFSGGTSGLSIGHVSPEAASGGLIGLVQDGDFINIDIPNRGIVLDVSEAELAARRETEEAHGDAAWSPKGRERQVSYALRAYAMLATSADKGAVRDKSKLGG

SEQ ID NO: 78096 - protein, 308 aa, Yersinia pestis
MTKKADYIWFNGEMVPWAEAKVHVMSHALHYGTSVFEGVRCYESHKGPVVFRHREHMQRLHDSAKIYRMPVSQSVDELMEACRATLRKNNLTSAYIRPLVFIGDVGMGVNPPEGYNTDVIIAAFPWGAYLGAEALEQGIDAMVSSWNRVAPNTIPTAAKAGGNYLSSLLVGSEARRHGYQEGIALDVHGYLSEGAGENLFEVKDGILFTPPFTSSALPGITRDAIIKLAKDMGLEVREQVLSRESLYLADEVFMSGTAAEITPVRSVDGIQVGIGKRGPVTAKIQQAFFGLFTGETEDKWGWLDQVNP

SEQ ID NO: 78097 - protein, 182 aa, Yersinia pestis
MQLNIPTWLTLFRVVLIPFFVLAFYLPFVWAPMVCAIIFVFAAATDWFDGFLARRWKQTTRFGAFLDPVADKVMVAVALVLVAEHYHSWWITLPAATMIAREIIISSLREWMAEIGKRSSVAVSWVGKVKTMAQMGSLVGLLWRPDHNVELASFVLLYIAAVLTFWSMFQYLNAAWSDLLEP

SEQ ID NO: 78098 - protein, 346 aa, Yersinia pestis
MSEPMVLSKPTVSSKPIVFSGAQPSGELTIGNYMGALRQWVQMQDDYDCIYCIVDLHAITARQDPALLRKRTLDTLALYLACGIDPKKSTIFVQSHVPEHSQLSWALNCYTYFGELSRMTQFKDKSARYAENINAGLFDYPVLMAADILLYQTNQVPVGEDQKQHLELSRDIASRFNNLYGDIFKIPEPFIPKAGARVMSLQDPTKKMSKSDDNRNNVIELLEDPKSVVKKIKRAMTDSDEPALIRYDVEKKAGVSNLLDILSGVTGQSIPELEAQFTGQMYGHLKGAVADAVSGMLSELQERYRTYREDEALLQDVMREGAAKARARAQVTLAKVYEAIGFVAQP

SEQ ID NO: 78099 - protein, 848 aa, Yersinia pestis
MSKIKIAIIGNGMVGHRFIEDLLDKADKDQFDITVFCEEPRIAYDRVHLSSYFSHHTAEELSLVREGFYEKQGVKVLVGERAITINRAEKVIHSNSGRSLYYDKLVMATGSYPWIPPIKGSEGQDCFVYRTIEDLNAIEACTRRSKRGAVIGGGLLGLEAAGALKSLGVETHVIEFAPVLMAEQLDPMGGDQLRQKIERMGVRVHTGKNTQEIVHSGQNSRKTMLFADGTQLEVDFIVFSTGIRPQDKLANQCGLATARRGGIAINDYCQTSDPDVYAIGECASWQERTFGLVAPGYKMAQVAADHLLGRENAFLGADMSAKLKLLGVDVGGIGDAHGRTEGARSYVYLDESKEIYKRLVVSADNKTLLGAVLVGDTTDYGNLLQLALNNITLPENPDSLILPAHAGNKPTIGVDSLPDSAQICSCFDVTKGDIIRAIGQGCQTVAALKSATKAGTGCGGCIPLVTQVLNAELSKQGIEVNNHLCEHFAYSRQELYHLIRVEGIKTFTELREKYGKGYGCEVCKPTVGSLLASCWNEYVLEPQHTPLQDTNDNFLGNIQKDGTYSIIPRSPGGEITPDGLLVVGQIAKEYNLYTKLTGSQRIGMFGAQKDDLPAIWARLIDAGFETGHAYAKALRMAKTCVGSTWCRFGVGDSVGFGVALEHRYKGIRAPHKIKFGISGCTRECAEAQGKDVGIIATENGWNLYVCGNGGMKPRHADLLAADLDEETLMRYLDRFMMFYIRTADKLQRTSVWLESLEGGIRYLQLVILEDKLGINDQLEAEIARLRDKVACEWKATVENPAAQVRFAHFINSSLRDPNVQVVREREQHRPARPDERIPVRVLELEDNA

SEQ ID NO: 78100 - protein, 394 aa, Yersinia pestis
MNNSNRIRLTWISYLSYALTGALVIVTGIVMGNIAEYFNLPIASMSNTFTFLNAGILISIFLNAWLMEIIPLKRQLVFGFILMLIAIAGLMVGHNLMIFSISMFIFGVVSGITMSIGTFLVTHMYEGRQRGSRLLFTDSFFSMAGMIFPIAAAMLLARHIEWYWVYACIGLLYVGIFVLTLCSEFPVLGHKATDQSKPVVKEKWGVGVLFLAIAALCYILGQLGFIQWVPEYATKTFNMNISQAGQLVSNFWISYMIGMWIFSFILRFFDLQRIVTVLAAMATLAMYLFVSTDNPAYLSYYILALGFVSSAIYTTLITLGSLQTKVSSPKLVNFILTCGTVGTMLTFVVTGPIVANNGVHAALETANGLYLAVFILCLALGFFTKHRSHGHVTH

SEQ ID NO: 78101 - protein, 248 aa, Yersinia pestis
MAEWVSGKITHIEHWTDALFSLQVNAPVDPFTAGQFAKLALDINGERVQRAYSYVNAPSDHNLEFYLVTVPEGKLSPRLDQLSVGGEVMITKQAAGFFVLEEIPDCDTLWMLATGTAIGPYLSILQEGQDLERFKHLVLVHAARFAHDLSYLPLMQQLEQRYNGKLRIQTVVSREESPGSLTGRVPALIENGALEAAVGLKIDAKDSHVMLCGNPQMVRDTQQLLKEQREMRKHLRRKPGHMTSEQYW

SEQ ID NO: 78102 - protein, 427 aa, Yersinia pestis
MDMKFCKNRYINTVILGAGVAGLGAALKAREVNIEYEIFEAKASAGGLLDNFVIDGYRFDNAVHLSFATEEKVRDIFDRTPYFSHSPDAVNFETDKWLKHPVQNNLYPLPAIEKVTLIESLIHRPESELADNYESWLIHQYGNEIAKRYPMRYTRKYWQCNANELSVSWIGNRLRRAKLSEILYGAFTDDTPNDYYAKEMRYPKKGGFKSFIQPLIDESIINYNYEVTEIDLSGKTIKFSNGVIISYENLINTLPLPLFIEFCGANVPTSVKKSASKLEATSLDLISVGFNKSIIKDLWFYIYDEDIYASRAYSPSVKSSDNVPDGCSSLQFEIYNPGRDSQYTVQELKDNVMYAMKKMGVANDEDIVFLHHKRLPWGNVVFKKDMEKYRDIVREYIFDNQVKSVGRFGEWDYLWSNQSFLSGYSSI

SEQ ID NO: 78103 - protein, 282 aa, Yersinia pestis
MSQTASSTLKGQCIAEFLGTGLLIFFGAGCVAALKLAGASFGQWEISIIWGLGVAMAIYLTAAISGAHLNPAVTIALWLFACFERRKVLPYIVAQVAGAFCAAALVYGLYYSLFVDFEQTHQMVRGSTESLQLAGIFSTYPNPHISVVQAFLVETVITAILMCLILALTDDGNGIPRGPLAPLLIGILIAVIGASMGPLTGFALNPARDLGPKAFSYLAGWGDIAFTGGRDIPYFLVPIFGPIVGALLGAFGYRALIGRHLPCDVCTLEDEESTTITTERKA

SEQ ID NO: 78104 - protein, 339 aa, Yersinia pestis
MGNRSLSMTQRPRKVKWVLPKGATQFGALAVILLIDSLVAPHFFSIHIQDGRLFGSIIDILNRGAPVALLALGMTLVIATGGIDLSVGAVMAIAGATAATLTSAGYPFMTVLALSLAVGALCGLWNGFLVAVLQIQPIVATLMLMVAGRGIAQLITEGQIVTFDSGGLATLGSSTLMYLPMSVVIACSMLILVWLLTRKTALGLFIESVGINLRSARNAGVSTRLVLIAVYVICGVCAAVAGIIVTADIRGADANNAGLWLELDAILAVVIGGASLMGGRFNLLLSVIGALIIQGMNTGILLSGYQPEFNLVLKAIVVLAVLVVQSPMISLSHLFQRRK

SEQ ID NO: 78105 - protein, 214 aa, Yersinia pestis
MRIILLGAPGAGKGTQAQFIMEKYGIPQISTGDMLRAAVKAGSELGLKAKEIMDAGKLVTDELVIALVKERITQEDCRDGFLLDGFPRTIPQADAMKEAGIKVDYVLEFDVPDELIVERIVGRRVHAASGRVYHVKFNPPKVEDKDDVTGEELTIRKDDQEATVRKRLIEYHQQTAPLVSYYHKEADAGNTQYFKLDGTRNVAEVSAELATILG

SEQ ID NO: 78106 - protein, 512 aa, Yersinia pestis
MDAAQSPYLAFRGIGKSFPGVLALDDISFTCQAGQIHALMGENGAGKSTLLKILSGNYTPTQGEIHIKGKAVNFTNTTDALDAGVAIIYQELHLVPEMTVAENIYLGQLPTKMGMVDRKLLRYESRIQLSHLGLDIDPDTPLKYLSIGQWQMVEIAKALARNAKIIAFDEPTSSLSAREIEQLFRVIRELRAEGRVILYVSHRMEEIFALSDAITVFKDGRYVRTFDDMTQVNNASLVQAMVGRNLGDIYGYQPREIGSERLTLQAVKAIGVASPISLTVHQGEIVGLFGLVGAGRSELLKGLFGDTKLTSGKLLLDGQPLTIRSPIDAISAGIMLCPEDRKADGIIPVHSVQDNINISARRKTLTAGCLINNRWEADNALLRIQSLNIKTPGPQQLIMNLSGGNQQKAILGRWLSEDMKVILLDEPTRGIDVGAKHEIYNVIYQLAKQGIAVLFASSDLPEVLGLADRIVVMREGAISGELDHEYATEEQALSLAMLRTPNIATNTASAVA

SEQ ID NO: 78107 - protein, 328 aa, Yersinia pestis
MVTLEDVAVLAGVSRATVSRVVNGDTNVKALTREKVEQAVAVLGYTPHPAARALASSQSNTLGLVTTSYRGGFFGALMDFVQTETESQGKQLLVTQGRDNADKEWLAIQRLYNLRCDGLILHVRFLSDERLRQLAAANRPFVLLDRLVPDLEARCVTFDHHHASQMATQVLIDAGHRDIACISGSSQRQSSVLRIQGFLDAMQLAGLEPVACLEGVYDLESGYLRADEILKQPRLPTAIYCCNEEMAIGALLAINKHGLQVPQDISLICYDSGERAPFVCPALTSVHFPIVEMAQYATQLLIDPLIPAVNFPPAIIMRDSVMPPKTAC

SEQ ID NO: 78108 - protein, 624 aa, Yersinia pestis
MNMKGQETRGFQSEVKQLLHLMIHSLYSNKEIFLRELISNASDAADKLRFRALSNPELFEGDGELRVRLSFDKEKRTLTLSDNGIGMTRDEVIDNLGTIAKSGTKAFLESIGSDQAKDSQLIGQFGVGFYSAFIVADKVTVRTRAAGAPADTGVFWESAGEGDYTIADITKDERGTEITLHLREGEDEYLDDWRLRSVISKYSDHIALPVEIQVKNEEDGTVTWEKINKAQALWTRGKAEISDDEYKAFYKHIAHDFTDPLSWSHNRVEGKQEYTSLLYIPAQAPWDMWNRDHKHGLKLYVQRVFIMDEAEQFMPNYLRFVRGLIDSNDLPLNVSREILQDSRITQNLRSALTKRVLQMLEKLAKDDAEKYQQFWQQFGMALKEGPAEDGSNKETIAKLLRFASTHTDSSAQTVSLEDYVSRMAEGQEKIYYITADSYAAAKSSPHLELFRKKGIEVLLLSDRIDEWMMSYLTEFEGKAFQSVSKADDSLNKLADEENPEQQEAEKALEPFVERVKTLLGERVKDVRLTHRLTDTPAIVTTDADEMSTQMAKLFAAAGQQAPEVKYIFELNPDHGLVKRAAEVTDDTQFAQWVELLLDQALLAERGTLEDPNQFIRRMNQLLTA

SEQ ID NO: 78109 - protein, 201 aa, Yersinia pestis
MQTSPLLESLMEALRCLPGVGPKSAQRMAFQLLQRDRSGGMRLAQALTRAMSEIGHCADCRTFTEQEHCTICLNPRRQQNGQICVVESPADIHAIEQTGQFGGRYFVLMGHLSPMDGIGPGDIGLDLLEKRLSTEAISEVILATNPTVEGDATANYIGQMCGQYGILASRIAHGVPVGGELEMVDGTTLSHSLAGRNPIKY

SEQ ID NO: 78110 - protein, 110 aa, Yersinia pestis
MFGKGGIGNLMKQAQQMQEKMQQMQEEVAKLEVTGESGAGLVKVTINGAHNCRRVEIDPSLLVEDDKEMLEDLIAAALNDAARRIDETQKEKMASVSNGMQLPPGFKMPF

SEQ ID NO: 78111 - protein, 658 aa, Yersinia pestis
MSYQVLARKWRPQTFADVVGQEHVLTALANGLSLGRIHHAYLFSGTRGVGKTSIARLLAKGLNCETGITATPCGTCANCQEIEQGRFVDLIEIDAASRTKVEDTRELLDNVQYAPARGRFKVYLIDEVHMLSRHSFNALLKTLEEPPAHVKFLLATTDPQKLPVTILSRCLQFHLKALDVEQIRAQLEKVLLAEQITSDARALQLLARAADGSMRDALSLTDQAVSMGQGQVTTVTVSQMLGTLDDEQPLAIIEALVSADGARVMAQIEQAASRGVDWENLLVESLSLLHKIAMVQLLPSMLDNHYAAIEPRLRELARTLPPADIQLYYQTLLVGRKELAYAPDRRMGVEMTLLRALAFHPKAIIAEPQIAHVAAPSAIADNAVPTSQGGQHRQEPASVPPSSHQEAPPLGAVASSVQLPESTAQLLQARTQLLRQSGTTTTKKNEPAAPGKARPANSALERLASVTERSQQRLAAKTTEEKKPAKKEAYRWTAKNQPEVAAEPIATPKALRSALEHEKTPELSAKLAEEAIARDPWAAEVNKLQLPKLVQQLALNAFKQEIEPGNICLHLRSAQRHLNSASAQKALSDALSELHGNAVTLSVIEDDNPAERTPLEWRQAIYEEKLAQARQSIIADNNIQTLRRFFDAELDEDSIRPI

SEQ ID NO: 78112 - protein, 287 aa, Yersinia pestis
MATKPQDANTTSREAITSKADSPPRPTALIFDSGVGGLSVYQEIRQLLPDLHYIYAFDNVAFPYGEKSGEFIVERVLEIVTAVQQRHPLAIVVIACNTASTVSLPALRERFAFPVVGVVPAIKPAVRLTRNGVVGLLATRATVHASYTLDLIARFATDCKIELLGSSELVEVAETKLHGGVVPLEVLKKILHPWLSMREPPDTIVLGCTHFPLLTEELAQVLPEGTRMVDSGAAIARRTAWLISSQENVISSQDENIAYCMALDEDTDALLPVLQSYGFPKLQKLPI

SEQ ID NO: 78113 - protein, 391 aa, Yersinia pestis
MLKMNNAVQNYAWGSTDALTQLYGIPNPQGMPMAELWMGAHPKSSSQVLDANGQWHSLRDVIDQDPDNTLGSDIFKRFGELPFLFKVLCAAQPLSIQVHPSKAAAEVGFAKENQAGIPLDAAERNYKDANHKPELVYALTPFQAMNGFRTLEDIQALLQPLAAAHPDIAAFLRQPDTEHLASLFASLLSMSGETKTRALGILKAALNSQLGEPWDTIRSISCFYPDDSGLFSPLLLNAVTLQPGEAMFLYAETPHAYLNGVALEVMANSDNVLRAGLTPKFIDIPELMSNLQFIPKPANALLTTPKQQGNELIFPIPVEDFAFSLHTLVVEPHVLAQHSAAIIFCVEGCAVLKKQEQEITLHPGESCFISAKESPVTVQGVGSIARVYNAV

SEQ ID NO: 78114 - protein, 372 aa, Yersinia pestis
MTTSLHTTNTVAPASTKNDDDTVFTTIPKLPPLNKRPYIQQGTPEFIRVALALFSAGLATFALLYCVQPILPMLSQDFSTSPASSSLSLSIATGMLALGLMFTGPLSDAIGRKSVMVVALLLAAVCTIVCSFMTSWHGILLMRALTGLSLSGVAAVAMTYLSEEIHPNFIALSMGLYISGSSIGGMSGRLVAGVLSALFSWRVSLLVLGLFALAAACLFWFILPASKHFRASSLRPRTLLINFKLHWRDSGLPLLFAEGFLIMGGVVTLFNYIGYRLLDGPYYLSPTIVGLLSIVYLTGSYSSPKAGSLSNRYGRGLILLASIGMMLVGVVITSFPSVIMIFIGMMFVAAGFFAAHSVVSSWVGCRARRAKA

SEQ ID NO: 78115 - protein, 178 aa, Yersinia pestis
MSTEKLLQVLESQIEALSAQIAPQANTPSQQARFDLNLFSNHGNRFRDYLQEVRKNMTQLKQVVEENRLQQVAFLADKLVAQISALQRELATQKIRKSNPEPREHQSDPYHKLAEHQDYERRILAMIQDRESQLGRQSLLVEQQKIQKELAALEGRLMRCRQALIRIERSIEKKENGF

SEQ ID NO: 78116 - protein, 466 aa, Yersinia pestis
MQQHFHFDAIVIGSGPGGEGAAMGLVKQGARVAVIERYNNVGGGCTHWGTIPSKALRHAVSRIIEFNQNPLYSDNARTIKSSFADILNHADRVINQQTRMRQGFYDRNHCHMFSGDASFIDANTVNVRYADGTSDTLQADNIVIATGSRPYRPVNVDFNHERIYDSDTILQLSHEPQHVIIYGAGVIGCEYASIFRGLSVKVDLINTRDRLLAFLDQEMSDALSYHFWNNGVVIRHNEEFEQIEGTTDGVIVHLKSGKKVKADCLLYANGRTGNTSGLGLENIGLEADSRGLLKVNSMYQTALSHVYAVGDVIGYPSLASAAYDQGRIAAQAMIKGEANVHLIEDIPTGIYTIPEISSVGKTEQELTAMKVPYEVGRAQFKHLARAQIVGMDTGSLKILFHRETKQILGIHCFGERAAEIIHIGQAIMEQKGEGNTLEYFVNTTFNYPTMAEAYRVAALNGLNRLF

SEQ ID NO: 78117 - protein, 1139 aa, Yersinia pestis
MSSRARIALFDPFLFCRQTMFTLVIIVLLLFSSTFVFGISAFASGINVDVPTRSEVQSQLDLLSKQKILSPAEKLAQQDLTQTLEYLDTIERTKQEANQLKQQLAQAPAKLRQATEGLEALKSSSADTMTKESLANYSLRQLESRLNETLDNLQSAQEDLSAYNSQLIALQTQPERVQSAMYSASMRLMQIRNQLNGLTPNQESLRPTQQQELLAEQVMLNGQLDLERKNLEANTTLQDLLQKQRDYTTAHINQLERYVQLLQEVVSGKRLILSEKTVKEAQAQTDGSDIQNDPLISRELAINKELSERLINATKEGNTLVQQNIRVKNWLDRALQSERNLKEQITVLRGSLLLSRILYQQQLNLPASGLITNMGPRIADLRLEQFEINQQRDKLFQGDDYIQTLMESSKEKVDPNVEDALGQIVDIRRELLDQLNKQLGNQLTLAINLQINQQQLLSVNESLQHTLTQQIFWVSSNKPMDWSWLKALPGAIKTELSNFQVTLSLGDALAGLLKSLVFLIPMLVVAVVIRSRYHMINTYLDQLAADIGQLKRDSQMHTPKAILLTVLKILPNVLLILGIGYWCLRSDFNLSGLLWSFFQRLALFWLVFELTYRMLSPGGITERHFMISTDRCAHYRRQIVRLGAALLPVIFWSVLGERSPLRLVDDVIGQIVIVIALALLALFIFPFCRDSWREKDSHAVRLVIITAITATPIVLMGLMVAGYFYTTLQLAGRWIDSLYLLFLWNIVYLTAIRGLGVAARRLAYRRAIARRQSMGKEGAEGSEPIEEPPLALDQINQQSLRLTTMALFLIFATCFYWIWADLITVISYLDSISLWHYTATVAGASVTQAVTLGNMLVALMALVVAYVLTRNLPGLLEVVVLSRLQLRQGTSYAITTILTYLITAVGGITALSSLGVSWDKLQWLVAALSVGLGFGLQEIFANFVSGLIILFERPVRIGDTITIGTYSGTVSRIRIRATTITDFDRKEVIVPNKAFVTERLINWSLSDTITRIIIKVGVAYGSDLEKVKEVLLQAAHANSRVMTDPEPQVFFLNFGSSTLDHELRLYVRELRDRSYTVDELNRAIDKLCRENDINIAFNQLDVYLHKPDGTEVQEISRPIEATSLPATQSMLGKPKPDLP

SEQ ID NO: 78118 - protein, 706 aa, Yersinia pestis
MKWQRLIYHPEVNYALRQTLVLCLPAALGFAIGDLRLGLMFSLIPACCNIASLDTPHQHFFRRLIIGGVLFTLSSFLTQQLLLWHIPLPVIMLGLALIVGVSGTISPLNGRLLPAALIAAIFSLSMVGRAPIWQAPLLCAVGTLWYGVFNWLWFRLCKDQPIREPLSQLYHLLADYCDAKYSRLTQHLEPEKAIPPLLDRQQGMMDKVNQLYQQFNLLHNTTKKEQKRLLGLFQMALDLQEHITAALNQPEEMQDLIKKTPIEAVTQSNAQIISAQMRAIADDILYHRRTVEHFTAGVPLAELETIAQQNPDNPVAQFCYYHISHITQILSDRRPLYNRDLMSSQLSQPFWPALVSYLSFKSSALRDAARIGVTLAVGSYIGVLINLPKPYWILLTIMLVMQNGYNATRVRIHHRALGTLVGLILAAGLLHLQMTEITTLGIMLLITLLSYLVQRKNYGLAVVGRTITAVYILQLLTGEGANFLVPRLLDTLIGCALALGSALWLWPQWQSGLLRKNAHQALEAYQTILRLLLTPHPDITQLDYERFNVNKASNTVLSSLNQAMQEPGFNSKYLADMRLWATHSELIVCHINEMTTLIRENPLTEVDSPSTGGHTLMSTKLAASYLQLCEMAIQLCQQRLESDNLEDNDSVVQIPDMAPDTQASELERNLRRVLSHLNVMHTVSAMAWQQQPHHGIWRSRKLRDNT

SEQ ID NO: 78119 - protein, 1050 aa, Yersinia pestis
MAKFFIDRPIFAWVIAIIIMLAGALAIMKLPVAQYPTIAPPAITIAANYPGADATTVQNTVTQVIEQNMNGIDNLLYMSSSSDSSGNVQLTLTFNSGTDPDIAQVQVQNKLQLAMPLLPQEVQQQGVSVEKSSSSFLMVAGFISEDGTMQQEDIADYVGSNIKDPISRTPGVGDVQLFGSQYAMRIWMDPHKLNNYKLTPVDVINAIKIQNNQVAAGQLGGTPPVPGQELNSSIIAQTRLTNAEEFSQILLKVNTDGSQVRLKDVAIVKLGAESYNIIARYNGKPAAGIGIKLATGANALNTSAAVKAELAKLQPFFPSGLTVVYPYDTTPFVKISINEVVKTLIEAIILVFLVMYLFLQNFRATLIPTIAVPVVLLGTFAILSAFGYSINTLTMFGMVLAIGLLVDDAIVVVENVERVMQEEGLPPKEATKKSMEQIQGALVGIALVLSAVFVPMAFFGGATGAIYRQFSITIVSAMVLSVLVALILTPALCATMLKPIKKGDHGPKTGFFGWFNNMFEKSTHHYTDSVANILRSTGRYLVIYLAIVIGMAVLFMRLPSSFLPEEDQGVFLTMVQLPAGATQERTQKVLNHVTDYYLDKEKNVVNSVFTVNGFGFSGQGQNTGLAFVSLKNWDERKGEQNKVPAIVSRASAAFSKIKDGMVFAFNLPAIVELGTATGFDFQLIDQGNLGHQQLTDARNQLLGMAAQHPDMLVGVRPNGLEDTPQFKVEVDQEKAQALGVAISDINTTLGSAMGGSYVNDFIDRGRVKKVYVQADAPFRMLPDDIDKWYVRNNMGQMVSFATFSTAKWEYGSPRLERYNGLPSMEILGQAAPGKSTGEAMDLMQELAAKLPSGVGYDWTGMSYQERLSGNQAPALYAISLIVVFLCLAALYESWSIPFSVMLVVPLGVVGALLAATLRGLENDVYFQVGLLTTIGLSAKNAILIVEFAKDLMDKEGKGLVESTLESVRMRLRPILMTSLAFILGVMPLVISSGAGSGAQNAVGTGVMGGMITATVLAIFFVPLFFVVVRRRFSRKTDDIEHSHPVNTPVK

SEQ ID NO: 78120 - protein, 86 aa, Yersinia pestis
MKPNIHPPYRTVVFHDTSADAYFTVGSTIATERTIERDGQTYPYVTLDISSASHPYYTGKQKEFAKEGSTARFHQRFGSFLTKKTN

SEQ ID NO: 78121 - protein, 457 aa, Yersinia pestis
MALWGGRFSQAADQRFKQFNDSLRFDYRLAEQDIIGSVAWSKALVTVGVLNADEQQQLEQALSVLLEEVQANPHAILASDAEDIHSWVETKLIDKVGDLGKKLHTGRSRNDQVATDLKLWCKFQITELQTAVQQLQQALVMTAEANQDAVMPGYTHLQRAQPVTFAHWCLAYVEMLSRDESRLQDTLKRLDVSPLGCGALAGTAYAIDREQLAGWLGFASATRNSLDSVSDRDHVLELLSDASIGMVHLSRFAEDLIFFNSGEAAFVDLSDRVTSGSSLMPQKKNPDALELIRGKCGRVQGALTGMTMTLKGLPLAYNKDMQEDKEGLFDALDTWLDCLHMAALVLDGIQVKRPRCKEAAEQGYANATELADYLVAKGVPFREAHHIVGEAVVEAIRQGKALEALALSDLQQFSSVIGDDVYPILALQSCLDKRVAKGGVSPQQVASAIAEAKARLF

SEQ ID NO: 78122 - protein, 904 aa, Yersinia pestis
MLIKLLTKVFGSRNDRTLRRMQKVVDVINRMEPDIEKLTDTELRAKTDEFRERLAKGEVLENLIPEAFAVVREASKRVFGMRHFDVQLLGGMVLNERCIAEMRTGEGKTLTATLPAYLNALSGRGVHVVTVNDYLAQRDAENNRPLFEFLGLSIGINLPNMTAPAKRAAYAADITYGTNNEFGFDYLRDNMAFSPEERVQRQLHYALVDEVDSILIDEARTPLIISGPAEDSSEMYIRVNKLIPKLIRQEKEDSDSFQGEGHFSVDEKSRQVHLTERGLILIEQMLVEAGIMDEGESLYSPANIMLMHHVTAALRAHVLFTRDVDYIVKDGEVIIVDEHTGRTMQGRRWSDGLHQAVEAKEGVEIQNENQTLASITFQNYFRLYEKLAGMTGTADTEAFEFSSIYKLDTIVVPTNRPMIRKDLADLVYMTEQEKIGAIIEDIRERTANGQPVLVGTISIEKSEVVSAELTKAGIEHKVLNAKFHAMEAEIVSQAGQPGAVTIATNMAGRGTDIVLGGSWQSEIAALEDPTEEQIAAIKAAWQIRHDAVLASGGLHIIGTERHESRRIDNQLRGRAGRQGDAGSSRFYLSMEDALMRIFASDRVSGMMRKLGMKPGEAIEHPWVTKAIANAQRKVESRNFDIRKQLLEYDDVANDQRRAIYSQRNELLDVSDVSETINSIREDVFKTTIDSYIPTQSLEEMWDIEGLEQRLKNDFDLDMPIAKWLEDEPQLHEETLRERILQQAIETYQRKEEVVGIEMMRNFEKGVMLQTLDSLWKEHLAAMDYLRQGIHLRGYAQKDPKQEYKRESFAMFAAMLESLKYEVISVLSKVQVRMPEEVEALEVQRREEAERLARQQQLSHQTDNSALMSEEEVKVANSLERKVGRNDPCPCGSGKKYKQCHGRLQ

SEQ ID NO: 78123 - protein, 173 aa, Yersinia pestis
MKPWQPKALWQIVGGAALAVSLTGCAHQSAEAPVAAPISTATVAASVAQSTVHGTVNIRERVALPPDAVVTVTLSDISLADAPSRVIAQKAVRTEGKQAPFTYSLPFNPSDIQPNARVIVSAAITRNGQLLFITDTIQEVINRGAGTQADLLLVPVPSVALEIVPAPAAATIQ

SEQ ID NO: 78124 - protein, 329 aa, Yersinia pestis
MNSVDISVIVPVYNCANYLTDLLDSLRSQTGVSLEIIAVNDGSTDHSLALLEQVAHIDSRLVIINQQNQGLSEARNVGIAKAKGNWVAFADGDDWLAPHALSTWLQQVKQQKLDVLIGNGYQFSSNPERKPVTPLLGQQPWGATLNGQQWIILSVKQKEWPHYAWLQLIRRDVISTHQLQFIRDMLHEDILWTTQLALVAQRIGFCATPFYGYRTNPDSITNSPSMQALLRRANSYVDIINALVKIAASTKPPVRDALLSHANQESGHLLGLLRKKLPASPQRTALAIRFITLGLRPALFRGVTNLHELWRAIRCSFLMGSYARQKRAE

SEQ ID NO: 78125 - protein, 131 aa, Yersinia pestis
MAEQPRTQGPAKGVLDTVHRIATIVVGIVETRVRLAVIELEEEKATLVQLLMMAGITLLLTAFGLMSLLVLVIWAIDPAYRLVALGTTTAVLLILALIGVIWTLTKVRHSTLLGSTRKQLETDRELLEKDH

SEQ ID NO: 78126 - protein, 124 aa, Yersinia pestis
MATINQLVRKPRSMKVAKSNVPALEACPQKRGVCTRVYTTTPKKPNSALRKVCRVRLTNGFEVTSYIGGEGHNLQEHSVILIRGGRVKDLPGVRYHTVRGALDCSGVKDRKQSRSKYGVKKPKA

SEQ ID NO: 78127 - protein, 546 aa, Yersinia pestis
MNKLQDTGSLAVVEAIDKLEMLYDAALAALRDAISAFIRDGSLPNAAERSKGLFSYPQLSVRWDGKFSDHHRTRAYGRFSRAGQYSTTITRPALFREYLTEQMTLLESEYGAVFEVTPSQQEMPYPFVIDGSDLILDRSMTAGLAQHFPTTDLAKIGDGITDGIETIALGTASLGSAVSDLPLSHFDALRTDFSLARLKHYTGTPAEDIQPYILFTNYSRYVDEFVRWAGEQILDPNSPYKALSCAGGSYITAENADPEKTLSDLAWKKHQMPAYHLIAKNGQGITLVNIGVGPSNAKTICDHLAVLRPHVWLMIGHCGGLRESQSIGDYVLAHAYLRDDHVLDAVLPPDIPIPSIAEIQRALYDATKAVSGMPGVEVKQRLRTGTVVTSDDRNWELRFSASSLRFSLSRAVAVDMESATIAAQGYRFRVPYGTLLCVSDKPLHGEIKLPGQANHFYEGAISEHLQIGIRAIDLIGGSSAKIRAMATRCRIPPDKSFGYRVRNSLKPSVFSKSSTTDWHFSFDSPLMSMPNAIFFSTFIHGNSAYS

SEQ ID NO: 78128 - protein, 101 aa, Yersinia pestis
MPQDKTSEHLRAELKSLADTLEEVLQSSTDKPKAELDKLRAKAESALKDTRVRLSETSDKIAAQTKEIADKADNYVHDNPWTGVGIGAAVGVVLGVLLSRR

SEQ ID NO: 78129 - protein, 126 aa, Yersinia pestis
MLLRRSLLLALPLITFCGFATAASDNECDIKAKEIQQQIDYAKQHGNTRRAAGLETALKEVKTHCTEESLQAERQKKIRQKQHNVTERQQELKEAQQKGDAGKIAKQQKKLAEAQAELQQAQSQQH

SEQ ID NO: 78130 - protein, 129 aa, Yersinia pestis
MINFRGRFGRPLWHYLVLPVVLLLLAVILLTPMIVQTESTLKIRPNQQGLSLPDGFYLYQHLNGRGIHIKSIIPENDSLVVSLEFPEQQMQAIEVLQDVLPAGYAIVASESKKRHRLLPVFRSNQQNLG

SEQ ID NO: 78131 - protein, 156 aa, Yersinia pestis
MPRRRVIGQRKILPDPKFGSELLAKFVNILMVDGKKSTAEAIVYTALETLAQRSGKDFLEAFEVALDNVRPTVEVKSRRVGGSTYQVPVEVRPVRRNALAMRWIVDAARKRGDKSMALRLANELSDAAENKGSAVKKREDVHRMAEANKAFAHYRW

SEQ ID NO: 78132 - protein, 702 aa, Yersinia pestis
MARKTPIERYRNIGISAHIDAGKTTTTERILFYTGVNHKIGEVHDGAATMDWMEQEQERGITITSAATTCFWSGMAKQFEPHHVNIIDTPGHVDFTIEVERSMRVLDGAVMVYCAVGGVQPQSETVWRQANKYKVPRIAFVNKMDRMGANFLRVVGQLKSRLGANPVPLQLAIGAEEKFTGIIDLVKMKAINWNEADQGVTFEYEEIPADMAELAAEWHQNLVESAAEASDELMDKYLGGEELTEEEIKKALRQRVLKSEIILVTCGSAFKNKGVQAMLDAVIEYLPAPTDVESINGILDDGKDTPAVRHSDDKEPFSALAFKIATDPFVGNLTFFRVYSGIVNSGDTVLNSVKSQRERLGRIVQMHANKREEIKEVHAGDIAAAIGLKDVTTGDTLCDPNNPIILERMEFPEPVISVAVEPKTKADQEKMGMALGRLAKEDPSFRVWTDEESGQTIIAGMGELHLDILVDRMRREFNVEANVGKPQVAYRETIRETVKDVEGKHAKQSGGRGQYGHVVIDMSPLPPGGVGYEFVNEIVGGSIPKEFIPAVDKGIQEQLKSGPLAGYPVVDVKVRLHYGSYHDVDSSELAFKLAGSIAFKEGFKRAKPVLLEPIMKVEVETPEDYMGDVMGDLNRRRGIIEGMEDTATGKTVRVKVPLSEMFGYATDLRSQTQGRASYSMEFLEYAEAPSNVAKAVIEARGK

SEQ ID NO: 78133 - protein, 394 aa, Yersinia pestis
MSKEKFERTKPHVNVGTIGHVDHGKTTLTAAITTVLAKTYGGSARAFDQIDNAPEEKARGITINTSHVEYDTPARHYAHVDCPGHADYVKNMITGAAQMDGAILVVAATDGPMPQTREHILLGRQVGVPYIIVFMNKCDMVDDEELLELVEMEVRELLSAYDFPGDDLPVVRGSALKALEGEAEWEAKIIELAGYLDSYIPEPERAIDKPFLLPIEDVFSISGRGTVVTGRVERGIVKVGEEVEIVGIKDTVKSTCTGVEMFRKLLDEGRAGENVGVLLRGIKREDIERGQVLAKPGSIKPHTTFESEVYILSKDEGGRHTPFFKGYRPQFYFRTTDVTGTIELPEGVEMVMPGDNINMIVTLIHPIAMDDGLRFAIREGGRTVGAGVVAKVIA

SEQ ID NO: 78134 - protein, 496 aa, Yersinia pestis
MQNIIKIHPLDNVAVALQDLAADERIESGEFSVKLAQPVVRGHKFALTAIELGQMIVKYGLPIGHALTLIQPGEHIHSQNAKTNLSDLDEYEYQPEFSSLPPQMADRDVQIYRRPKGDVGIRNELWIIPTVGCVNGIARQIQQRFLKETQDAEGIDGVYLFSHPFGCSQLGQDHENTRTMLQNMVRHPNAGAVLVIGLGCENNQVDVFQTTLGKVDEERVRFMVCQQHDDEVEAGLEHLHALYQVMRHDRREPGQLSELKFGLECGGSDGLSGITANPLLGRFSDYVITNGGTSVLTEVPEMFGAERILMSRCRDEATFEKTVSMVNDFKQYFIAHDQPIYENPSPGNKAGGITTLEEKSLGCTQKAGQSQVVDVLKYGERLQRPGLNLLSAPGNDAVATSALAGAGCHMVLFSTGRGTPYGGFVPTVKLATNSELAAKKPHWIDFDAGKLIHGTSMDTLLNEFVDLIVEIANGKPARNEVNDFRELAIFKSGVTL

SEQ ID NO: 78135 - protein, 209 aa, Yersinia pestis
MIGLVGKKVGMTRIFTEDGVSIPVTVIEIEANRVTQVKSLENDGYRAVQVTTGAKKANRVTKPEAGHFAKAGVEAGRGLWEFRLPEGQEFTAGQEISVEIFADVKKVDVTGTSKGKGFAGTVKRWNFRTQDATHGNSLSHRVPGSIGQNQTPGKVFKGKKMAGHMGDERVTVQSLDVVRVDAERNLLLVKGAVPGATGGNLIVKPAVKA

SEQ ID NO: 78136 - protein, 201 aa, Yersinia pestis
MELVMKDAPGALTVSETTFGRDFNEALVHQVVVAYAAGARQGTRAQKTRAEVTGSGKKPWRQKGTGRARAGSVKSPIWRSGGVTFAAKPQDHSQKVNKKMYRGALKSILSELVRQDRLIIVEKFSVEAPKTKLLAQKLKDMALEDVLIVTGELDENLFLAARNLYKVDVRDVAGIDPVSLIAFDKVVMTADAVKQVEEMLA

SEQ ID NO: 78137 - protein, 274 aa, Yersinia pestis
MAIVKCKPTSPGRRHVVKVVNPELHKGKPYAPLLEKLSKSGGRNNNGRITTRHIGGGHKQHYRLVDFKRNKDGIPAVVERLEYDPNRSANIALVLYKDGERRYILAPKGLKAGDQIQSGVDAAIKAGNTLPMRNIPVGSTVHNVEMKPGKGGQLARSAGAYVQIVARDGSYVTLRLRSGEMRKVQADCRATLGEVGNAEHMLRVLGKAGASRWRGIRPTVRGTAMNPVDHPHGGGEGRNFGKHPVTPWGVQTKGKKTRSNKRTDKFIVRRRSKK

SEQ ID NO: 78138 - protein, 92 aa, Yersinia pestis
MPRSLKKGPFIDLHLLKKVEKAVESGDKKPIRTWSRRSTVFPNMIGLTIAVHNGRQHVPVFVSDEMVGHKLGEFAPTRTYRGHAADKKAKKR

SEQ ID NO: 78139 - protein, 110 aa, Yersinia pestis
METIAKHRHARSSAQKVRLVADLIRGKKVSQALETLTYTNKKAAGLVKKVLESAIANAEHNDGADIDDLKVTKIFVDEGPSMKRIMPRAKGRADRILKRTSHITVVVSDR

SEQ ID NO: 78140 - protein, 481 aa, Yersinia pestis
MNRVPTLSGIALSSGIALSTLLLSSALLTPNAIAAATGLYDRAAHGDVTQFGGARRLTEDQTQALRDSLSNKTVKNVILLIGDGMGDSEITSARNYAMGAGGFFKGIDALPLTGQYTHYALDKKTQKPNYVTDSAASATAWSSGVKTYNGALGVDVFGKDHVTLLELAKKAGKATGNVSTAELQDATPAAQFAHVTGRKCYGPEETSEKCSTNALEKGGRGSITEQMIEGRADVTLGGGAASFSQVAKAGEWKDQSLRDQALARGYVIVENLDDLNAIKHANQQKPLLGLFSPGNMPVRWQGPKASYHGNLDKPPVVCENNAERTSDIPTLAVMTEKAIDLLKTNENGFFLQVEGASIDKQDHSANPCGQFGETVDLDEAVQKALEFARADGNTLVIVTADHAHSSQIIEPEAKAPGLTQALTTKDGAVMAISYGNSEDDSQGHTGSQLRIAAYGPHAANVVGLTDQTDLFFTMRDAMALK

SEQ ID NO: 78141 - protein, 135 aa, Yersinia pestis
MHTHIKVRGFHIDVFQHVNNARYLEFLEEARWEWLDGQPVFQWMVEHQIAFIVVNINISYRRPAVLGDLLRIDSQLLKLNGKSGVMKHTITLEPTAIPVVDAELTFVCIDQRSQKALPLEGELREKLEELVNRGA

SEQ ID NO: 78142 - protein, 172 aa, Yersinia pestis
MKTFFIDRMATPQGELLLIADEENQLRAIDWTDHHDRLMKLLRNHYGADTFTLVEKRNPGGLSESMQRYFAGELSIIDTLPVKTAGTDFQRQVWQELRKIPCGETISYGELAKRINRPTASRAVGMANGLNPISIVVPCHRVIGSQGALTGYAGGVDRKRWLLVHEGYLLGC

SEQ ID NO: 78143 - protein, 90 aa, Yersinia pestis
MNKSQLIDKIAAGADISKAAAGRALDAIITSVTESLKEGDDVALVGFGTFAVRERSARTGRNPQTGKEISIPAAKVPGFRAGKGLKDAVN

SEQ ID NO: 78144 - protein, 784 aa, Yersinia pestis
MNPERSERIEIPVLPLRDVVVYPHMVIPLFVGREKSIRCLEAAMDHDKRIMLVAQKEASTDEPGINDLFSVGTVASILQMLKLPDGTVKVLVEGLQRARITTLSDSGEHFAAQAEYLESPVMDDREQEVLVRTAINQFEGYIKLNKKIPPEVLASLHSIDDAARLADTIAAHMPLKLNDKQAVLEMFDITERLEYLMAMMESEIDLLQVEKRIRNRVKKQMEKSQREYYLNEQMKAIQKELGEMDDTPDEHEALKRKIEAAKMPKDAREKTEAELQKLKMMSPMSAEATVVRGYIDWMLQVPWNSRSKVKKDLVKAQEVLDTDHYGLERVKDRILEYLAVQSRVSKIKGPILCLVGPPGVGKTSLGQSIAKATGRQYVRMALGGVRDEAEIRGHRRTYIGSMPGKLIQKMAKVGVKNPLFLLDEIDKMASDMRGDPASALLEVLDPEQNVAFNDHYLEVDYDLSDVMFVATSNSMNIPAPLLDRMEVIRLSGYTEDEKLNIAKQHLLPKQFERNAIKKGELTIDDSAIMSIIRYYTREAGVRSLEREISKLCRKAVKNLLMDKTVKHIEINGDNLKDFLGVQKVDYGRADTENRVGQVTGLAWTEVGGDLLTIETACVPGKGKLTYTGSLGEVMQESIQAALTVVRARADKLGINPDFYEKRDIHVHVPEGATPKDGPSAGIAMCTALVSCLTGNPVRADVAMTGEITLRGLVLPIGGLKEKLLAAHRGGIKVVLIPDDNKRDLEEIPDNVIADLEIHPVKRIDDVLAIALEHPAFGAQPVAPK

SEQ ID NO: 78145 - protein, 508 aa, Yersinia pestis
MRIGVPRERLANEARVAATPKTVEQLLKLGFTVAIESGAGHLASFDDAAYQEAGAIITDTTDVWQSDLILKVNAPFEDEIALMREGSTLVSFIWPAQNPELLQKLAERQVTALAMDSVPRISRAQSMDALSSMANIAGYRAIVEAAHEFGRFFTGQITAAGKVPPAKVMVIGAGVAGLAAIGAAGSLGAIVRAFDTRPEVKEQVQSMGAEFLELDFEEEAGSGDGYAKVMSEAFIKAEMELFAAQAAEVDIIVTTALIPGRPAPRLITKEMVASMKSGSVIVDLAAQTGGNCELTVADEVTITENGVKIIGYTDLPSRLPTQSSQLYGTNLVNLLKLLCKEKNGEIDIDFDDTVIRGVTVVKTGEVTWPAPPIQVSAQPQAAKAAPIAKEETKPSSPWTKYIIMAVAIVLFGWLANVAPPEFLSHFTVFALACVVGYYVVWNVSHALHTPLMSVTNAISGIIVVGALLQIGHGGWVSFFSFIAVLIASINIFGGFTVTQRMLKMFRKN

SEQ ID NO: 78146 - protein, 463 aa, Yersinia pestis
MEKKLGLTALTALVLSSMLGAGVFSLPQNMAEVASPAALLIGWSITGIGIIFLAFAMLLLTRLRPDLDGGIFTYAKEGFGDLIGFFSAWGYWLCAVIANVSYLVIVFAALSFFTDKSGSIIFGEGNTWQALLGASFLLWLVHALVLRGVQTAASINLAATLAKLLPIGGFIILAGIAFSLDTFSIDFTGLALHTPVWQQVKDTMLITLWVFIGVEGAVVVSARARNKKDVGRATMLAVISALSVYLLITLLSLGVVPRAELAGMRNPSMAGIMVEMIGPWGEIIIATGLIISVCGAYLSWTIMAAEVPMVAAKHGAFPKIFRHQNKNNAPAQSLWLTNSAVQVALVLIWLTGSNYNTLLTIASEMILVPYFLVGAFLFKVALKRQDWRLIVAASGACLYGLWLIYAAGLVYLLLSVLLYAPGLLVFIYARKGHEGLRLLNTVERAAIFLVLLATIPATWLMMH

SEQ ID NO: 78147 - protein, 423 aa, Yersinia pestis
MTDKRKDGSGKLLYCSFCGKSQHEVRKLIAGPSVYICDECVDLCNDIIREEIKEVSPHRDRSSLPTPHEIRHHLDDYVIGQEPAKKVLAVAVYNHYKRLRNGDTSNGIELGKSNILLIGPTGSGKTLLAETLARLLDVPFTMADATTLTEAGYVGEDVENIIQKLLQKCDYDVQKAQRGIVYIDEIDKISRKSDNPSITRDVSGEGVQQALLKLIEGTIAAVPPQGGRKHPQQEFLQVDTSKILFICGGAFAGLDKVIGQRINTGSGIGFGAVVKGQSEKATEGELLSQVEPEDLIKFGLIPEFIGRLPVVATLSELSEDALIQILKEPKNALTKQYQALFSLEGVELEFRDEALTAIAKKAMARKTGARGLRSIVEGALLDTMYDLPSMDSVEKVVVDESVIAGQSAPMLIYGQPEAQASGE

SEQ ID NO: 78148 - protein, 331 aa, Yersinia pestis
MIRFAVIGTNWITARFVDAAHESGKMKLVAVYSRKLDQAQTFGDDYHVTDCFDNLEALAASDLIDAVYIASPNALHYSQAKLFLSHKKHVICEKSLASNLAEVESLIACAHQHQVVLFEAFKTAYLPNFIQLQQALPRVGKLRKAFINFCQYSSRYQRYLNGENPNTFNPAFSNGSIMDIGYYCLASALALWGEPKSVWASASLLPSGVDAHGTVSLNYGDFDVIIIHSKVSQSDIPSEIQGEDGSLVIESISECLSVAFTPRGSHSQDLTQPQHINTMLYEAEAFARLVENNRVDHDGLHLSLLTSRIQTEIRRQTGVIFPADTQYPAAS

SEQ ID NO: 78149 - protein, 395 aa, Yersinia pestis
MSQLDLGTQSLELERFPPQENSNTLQAWEAADEYLLQNIDLSQIDGRPVLVFNDQFGTLACALHAYRPFSSSDSYMSQLATAHNLRLNHLDESAVTLLSSVDDLPEAPKLVVIKIPKALALLEHQLRALRRVVAPDTVIIAGAKSRDVHNSTLQLFEKILGPTKTTLAWKKARLIHCEVADIPLADAPETIDWPLPNTDYIIHNHANVFSRNNLDIGARFFMEILPYDVTGKIADLGCGNGVVGLIALEQNPLAEMLFVDESYMAVASSELNITVNRPQDLSRCEFMVSHGLAGVERESLQLVLCNPPFHQQHAVSDHVAWQMFCDAKRCLKAGGELMIVGNRHLDYFHKLKRLFGNCETLDSNQKFMVLKSVKQASSRSEGGGSGSLDMSYSDF

SEQ ID NO: 78150 - protein, 673 aa, Yersinia pestis
MLAYPHLFTPLDLGFTTLKNRILMGSMHTGLEELPDGPQRLAAFYAERAAGGVGLIVTGGIAPNMKGGVYQGASVLNDAAQIPHHQVVTEAVHQAGGKIALQILHAGRYSYQKHPVAPSALQAPINPFVPQALSHEEILQTIADFAHCAQLAKQAGYDGVEIMGSEGYLINQFLTARTNQRDDEWGGDFTHRMRFAVEIVRAVRQATGHDFILIYRLSMLDLVEEGSNWVEIEQLAQAVEQAGATVINTGIGWHEARIPTIATMVPRAGFSWVTRKLMGKVNIPLITTNRINDPAVAEQVLADGCADMVSMARPFLADAAFVQKAAQGRADEINTCIGCNQACLDQIFDGKLTSCLVNPRACRETEMPELPTDAPKRLAVVGAGPAGLAFAVTAARRGHQVTLFDAAAEIGGQFNIAKQIPGKEEFYETLRYFRRQLVLNGVTLQLNTLVQVKQLAEFDEVILACGIQPRLPCINGIDHPKVLTYLDVLRDKKPVGQRVAIIGAGGIGFDTAEYLSQSGDSPRFDSTAFSTEWGIDQDLAHRGGLSPAGAKVPPSPRQIFLLQRKASKVGEGLGKTTGWIHRTSLAMRGVKMLNSVSYEAIDDKGLHIIRAEQACCLPVDTIIICAGQEPRRELHQPLLDMGKTVYLIGGADKAVELDARRAIDQGTRLALAI

SEQ ID NO: 78151 - protein, 318 aa, Yersinia pestis
MRLKKYIKNMGILSLFAATVMLSGCNMVLMNPKGAIGVEQKTLILTAIGLMLIVVIPVIFMAFAFAWKFRASNKSATYTPNWSHSNKIELVVWAVPIIIIAILATITWKTTHELDPFKPIVVAGKDPITIEVVSLDWKWLFIYPEQGIATVNELAFPTGVPVNFKITSNSVMNSFFIPQLGGQIYAMAGMQTKLHLIANEPGKYNGISGSFSGQGFSGMKFTAIATPTQEDFNQWVEQVKKSPNTLNTTNDFEKLAKPSENNPVEYFSSIKPALFKGIIGKFMGDMNMPKNGHDMPKGMDMSQGMEMGEHTAHAGAEE

SEQ ID NO: 78152 - protein, 663 aa, Yersinia pestis
MLGKLTLDAVPLGEPIIMVTVAAIIIGGAALVAALTYFGKWKWLWSEWLTSVDHKKIGIMYILVAMVMLLRGFADAIMMRSQQALASAGEAGFLPPHHYDQIFTAHGVIMIFFMAMPFVVGLMNIVVPLQIGARDVAFPFLNSLSFWLFAVGVVLINISLGVGEFAQTGWLAYPPLSGIEYSPGVGVDYWIWSLQISGLGTLLTGVNFFATILKMRAPGMSMMKMPVFTWAAFCTNILIIVSFPILTVTVALLTLDRYLGTHFFTNDMGGNMMMYINLIWAWGHPEVYILVLPVFGVFSEVTATFSRKRLFGYTSLVWATIAITVLSFIVWLHHFFTMGSGANVNAFFGIATMIISIPTGVKIFNWLFTMYQGRIQINSAMLWTIGFIVTFSIGGMTGVLLAVPGANFVLHNSLFLIAHFHNVIIGGVVFGCFAGLTYWWPKSFGFMLNEKWGIRAFWFWIIGFFVAFMPLYVLGFMGMTRRLSQDINPEFHTMLMVAAGGAALIACGILCQVIQVFVSIRDREQNRDLTGDPWGARTLEWSTSSPPPFYNFAVVPNVVDRDEFWDMKEKGEAYKRPAKYEEIHMPKNTGAGVIIAGFSLIFGFAMVWYIWWLAIIGFVGMIVTWIVKSFDEDVDYYVPAAEVERIENLHHEQISKAGVNHVN

SEQ ID NO: 78153 - protein, 192 aa, Yersinia pestis
MINKTLLGLSLGALMFTAGSAVAADYKIDKEGQHAFIEFRIKHLGYSWLYGSFNDFDGSFTFDDKNPAADKVNVVINTNSVDTNHAERDKHLRGKSFLNVAKFPQATFESTEVKKNGDGYSVIGNLTLNGVTKPVTLESKLTGQGNDPWGGYRAGFEANGNIKLKDFNITTDLGPASQEVELILSVEGVQVK

SEQ ID NO: 78154 - protein, 278 aa, Yersinia pestis
MRLFLLLLSLLLISITTAFALDKPDGSNSIEDQTALFFGKDDRTAVTNSRQWPWEAIGQVETASGNPCTATLISPRLVLTAGHCVLTPPGNIDQAVALRFISDKGHWKYQITDLKTRVDAKLGQKLKADGDGWIVPPAAAAYDFALIQLTNAAPIPIKPLPLWEGTANELTKALKLVNRKVTQAGYPLDNLNTLYKHEDCLVTGWAQQGVLAHQCDTLPGDSGSPLLLKNGNSWSLIAIQSSAPAAKERYLADNRALSVTAINNRLKKLVNKIADTTQ

SEQ ID NO: 78155 - protein, 306 aa, Yersinia pestis
MSDTHAPVDFKQQLAAHQQRVNQALLDFIAPLPFGNSNLIEAMRYGAVIGGKRLRPYLVYATGQMFGLSLANLDAPAAAIECIHAYSLIHDDLPAMDDDDLRRGQPTCHVKFGEAHAILAGDALQTLAFSILAEAPMPDVADKDRLSMIIELAQASGAAGMCAGQALDLEAETRPVLLGDLEQIHRHKTGALIRAAVRLGAQAAGEAGRKTLLSLDRYAEAIGLAFQVQDDILDVIGDTATIGKRQGSDQQLGKSTYPALLGLDCAQTKAMDLYQEALEALDELAKQSYNTDSLQALARFIIERNN

SEQ ID NO: 78156 - protein, 727 aa, Yersinia pestis
MSTVYRDATLPIEARIDDLLSQMTLAEKVGQLCQQPMLDYQQHRDDYLAGVRAGRWGSRILADTAWAGNAPGENVDPCQLNEIQRAAVEHSRLGIPLLFARDVIYGQATVLPIPLAQAASWNPELVQQAYRVIAREAASLGIHWTFAPMLDIARDPRWGRTIETSGEDPWLTAQFAAAVVKGFQGDDLSAADSLMACAKHFVGYAAVEGGRDYDTTELSDNTLHNVHLPPFQAAIEAGVGSVMTGFCDFGGTPVTAHGELIRGWLKQQQNFDGLVISDWGSIADLTHFGIAQDALRAAELALQAGVDMAMTHEAYEDKLDQLVLQGRIKEALLDDAVRRVLRAKFRCGLFERPYVDEEWHKRELRRPEHLALAQRLAEQSIVLLKNRQALLPISRTSVPLTLAVIGPHAHSQRQHLGSWCLDGDADQVMSIYQSLCAIAGEVKVITEQSCFSDEMIECAHRADIVILCTGESHRRTGEARNIAELQLPPGQEELIAAVGRTGKPLVVIQCTGRPLPSPATEQYADALLYGWQCGSEAGKAIARIIFGEQVPCGKLPMTVPRSTGQIPIYYGRKPLGKMRDYREYQPYKDLADTPLYPFGFGLSYTRFTYSDLQLSHESLELGASLRVTMTVTNDGAVAGDEVVQCYIRQYVASTTRPQRELKGFQRISLQPGELGEVSFTLGVRELAFYGQHRRYAQEPSRISVFVGGDSTTPHQADFTLFENLYTV

SEQ ID NO: 78157 - protein, 100 aa, Yersinia pestis
MSYILQVDFPYTGPWGNEMTKAMEGLARSIAEEPGLIWKIWTVNETTNEAGGIYLFSDISAAKAYLAMHTARLKSFGIPHVNGKIFLVNEALSQLDRAPI

SEQ ID NO: 78158 - protein, 612 aa, Yersinia pestis
MEQNPQSQLKLLVTRGKEQGYLTYAEVNDHLPEDIVDSDQIEDIIQMINDMGIQVLEEAPDADDLMLAENTTDTDDDAAEAAAQVLSSVESEIGRTTDPVRMYMREMGTVELLTREGEIDIAKRIEDGINQVQCSVAEYPEAITYLLEQYDRVEAGESRLSDLITGFVDPNAEEDIAPTATHVGSELSTEEMDDEDEDEDEDDDAEDDNSIDPELARQKFSDLREQYENARMEIKKNGRNHANAAAEILKLSEVFKQFRLVPKQFDYLVNNMRAMMDRVRTQERIIMKLCVEQCKMPKKNFVTLFSSNETSDTWFNAAVAMGKPWSEKLKDVSEDVQRSLQKLRQIEEETGLTIEQVKDINRRMSIGEAKARRAKKEMVEANLRLVISIAKKYTNRGLQFLDLIQEGNIGLMKAVDKFEYRRGYKFSTYATWWIRQAITRSIADQARTIRIPVHMIETINKLNRISRQMLQEMGREPTPEELAERMLMPEDKIRKVLKIAKEPISMETPIGDDEDSHLGDFIEDTTLELPLDSATSESLRSATHDVLAGLTAREAKVLRMRFGIDMNTDHTLEEVGKQFDVTRERIRQIEAKALRKLRHPSRSEVLRSFLDD

SEQ ID NO: 78159 - protein, 582 aa, Yersinia pestis
MAGRIPRVFINDLLARTDIIDLIDARVKLKKQGKNYHACCPFHHEKTPSFTVNGEKQFYHCFGCGAHGNAVDFLMNYDRLEFVESIEELATMHGLEVPYEAGSGTTQIERHQRQSLYQLMESLSAFYQQSLKGQNAKQAREYLKHRGLSEEIIQHFAIGFAPPGWDNALKRFGRDGESRTALNDAGMLVTNDTGRTYDRFRERVMFPIRDKRGRVIAFGGRILGDGVPKYLNSPETEIFHKGRQLYGLYEAQVNHPNPTRLLVVEGYMDVVALAQFGIDYAVASLGTATTAEHIQLLFRATDNVICCYDGDRAGRDAAWRALETALPYLNDGRQLRFMFLPDGEDPDTLVRKEGKDAFEQRMEAAQPLSTFLFETLMPQVDLSSPDGRAKLSTLALPLISQVPGEALRLYLRQQLGNKLGLLDDSQLDKLMPKQIDNANTYQPPQLKRTTMRILIGLLVQNPQLATLIPSLQGLEQAKLAGLPLFIELVETCLAQPGLTTGQLLELYRDNKFSQQLETLATWNHMIVEDMVEPTFVDTLASLYDSILEQRQETLIARDRTHGLNAEERKELWSLNLALARKK

SEQ ID NO: 78160 - protein, 71 aa, Yersinia pestis; identical to SEQ ID NO: 43063

SEQ ID NO: 78161 - protein, 337 aa, Yersinia pestis
MRVLGIETSCDETGIAVYDDKAGLLANQLYSQVKLHADYGGVVPELASRDHVRKTVPLIQAALKEANLSAKDIDAVAYTAGPGLVGALLVGATIGRALAFAWGVPAVPVHHMEGHLLAPMLEENAPEFPFVALLVSGGHTQLISVTGIGEYLLLGESVDDAAGEAFDKTAKLLGLDYPGGPMLSRMAQQGTVGRFTFPRPMTDRPGLDFSFSGLKTFAANTIRANGDDDQTRADIARAFEDAVVDTLAIKSKRALDQTGFKRLVIAGGVSANQTLRLKLADMMQKRGGEVFYARPEFCTDNGAMIAYAGMVRLRSNLNSELSVSVRPRWPLSELPKV

SEQ ID NO: 78162 - protein, 216 aa, Yersinia pestis
MSAIALGMIIFAYLCGSISSAILVCRVARLPDPRTHGSGNPGATNVLRIGGRTAAVAVLLFDILKGMLPVWIAYLLHIPPLYLGLTAIAACLGHIYPVFFHFKGGKGVATAFGAIAPIGWDLTGLMTGTWLLTVLLSGYSSLGAIVSALIAPFYVWWFKPQFTFPVAMLSCLILMRHHDNIQRLWRGKEGKIWDKLRKKKQKTPAEEAAELEEKED

SEQ ID NO: 78163 - protein, 412 aa, Yersinia pestis
MNIYLVGGAVRDSLLNLPVTEQDWVVVGATPEQLLKLGYQQVGKDFPVFLHPVSHEEYALARTERKSGQGYTGFTCYAAPDVTLEDDLLRRDLTVNAIARSADGEFIDPYHGKQDLENRVLRHVSDAFGEDPLRVLRVARFAARFAYLGFTIAPETMSLMSNMAQSGELSALTPERVWKETEKALKTQSPHVYFQVLRDCGALAVLFPEIERLFGVPAPEKWHPEIDTGIHTLMTLAIAAQLSPEVDIRFAALCHDLGKGLTPKEHWPHHHGHGPAGVKLVEQLCQRLRIPNPVRDLAKLVAEYHDLIHTVNKLRPETLLKLFNAIDVWRKPERLEQMIMTSEADARGRTGFENNPYPQGDYLRAAFQIANGVSIQEVVASGLQGLAIRDELQRRRQQALAEWKQTQETASI

SEQ ID NO: 78164 - protein, 435 aa, Yersinia pestis
MTVEIELKFIATPAAIAALPEWIESQKNQHFPPQTLANIYFDTADKRLRQNDIGLRIRGYDGRYEMTVKTGGKVVGGLHQRPEYNVDIDSDQLDLARFPQDIWPEGWAVDLLQAELQPLFRTDFTREKWVITYGESEIELALDQGSISADTLSEPLSEIELELKQGTQGDLLALAAELAKMGGLRQSNLSKAARGYHLAQGNPPRELRPFLVFQPVAKSTVEQGMAGGLESILEHWQYHEELWLRGEPAAKTMIIDALAMVRQSLAIFGGLVPRKASTELRALLIALEPQLEPKSVDAALLCYSVDYLKCKLALTSWLITAGWRPFMDAKAQAKFDGSFKRFCDIMLSRSAADLKEAFGHNLDDDGYLAQLPRLNRQLIAFQLLSGFYPQSEWHPYIDAWFGLQQAIMARQGHWRDTARKEALSQAAFWLNGAVR

SEQ ID NO: 78165 - protein, 476 aa, Yersinia pestis
MKVTLPDFRRAGVLVVGDVMLDRYWYGPTCRISPEAPVPVVKVDTIEERPGGAANVAMNIASLGAVARLVGLTGIDDAARALICKLSEVRVRCDFVSVPTHPTITKLRVLSRNQQLIRLDFEEGFDGVDPTPIFERIQLALPQIGALVLSDYAKGALNSVQPMIQLARKANVPVLIDPKGSDFERYRGATLLTPNLSEFEAVVGRCKNEEELVNRGMQLVADFELSALLVTRSEQGMTLLQLGKPPLHLPTQAKEVFDVTGAGDTVIGVLAAALAAGNSLEESCFLANAAAGVVVGKLGTSTVSPIELENAIRGRAETGFGVMDEQQLKIAVAQARQRGEKVVMTNGIFDILHAGHVSYLANARKLGDRLIVAVNSDASTKRLKGEKRPVNPLEQRMVVLGALEAVDWVVPFEEDTPQRLIADILPDLLVKGGDYKPHEIAGSEEVWAAGGEVKVLNFEDGVSTTNIIQSIKNGRG

SEQ ID NO: 78166 - protein, 217 aa, Yersinia pestis
MNQTLLSDFGTPVERVERAIDALRNGRGVMVLDDESRENEGDMVFAAEAMTLEQMALTIRHGSGIVCLCITDERRQQLDLPMMVTHNSSQFQTAFTVTIEAAEGVTTGVSAADRLTTIRKAIADNAKPADLNRPGHVFPLRGQPGGVLSRRGHTEASIDLATLAGYKPAGVLCELTNDDGSMAHAPEVIAFAKLHDMPVVTIDDLAAYLQSRAKKAS

SEQ ID NO: 78167 - protein, 141 aa, Yersinia pestis
MSKRYTPDFPEMMRLCEINYAQLRRLIPRINEVGESVAYQIKEVSYRLTIIESTRYTSVVEIVQTAPAASHWSLPSMVVRLYHDAMVAEVCASQQISRFKASYDYPNKKLHQRDEKHQINQFLADWLRYCLAHGAVAVPVC

SEQ ID NO: 78168 - protein, 275 aa, Yersinia pestis
MESLFKLPMASGARVRILQITDTHLFAGEHETLLGVNTFHSYRAVLDAIIAEQHPFDLVVATGDLAQDHSVAAYQNFAKGISRLPVPCVWLPGNHDFQPAMFDALAEAGIAPSKQVLAGEHWQILLLDSQVFGVPYGELSDYQLEWMERCLIAYPERYTLILLHHHPMPSGCTWLDQHSLRNAHMLAAILTRYPRVTTLLCGHIHQDLDLDWYGKRLLASPSTCVQFKPHCTNFTLDAVAPGWRYLDLLPDGGLETEVHRLDSDEFCPDMDSDGY

SEQ ID NO: 78169 - protein, 631 aa, Yersinia pestis
MTESSYNADAIEVLSGLEPVRRRPGMYTDTSRPNHLGQEVIDNSVDEALAGHARRIDVILHADQSLEVIDDGRGMPVDIHPEEGVPAVELILCRLHAGGKFSNKNYQFSGGLHGVGISVVNALSKRVEVTVRRDSQIYSIAFENGDKVQDLQVIGTCGKRNTGTSVHFWPDVSFFDSPRFSVSRLSHLLKAKAVLCPGVEIVFKDQVNNTEQRWCYADGLTDYLMEAVNGFITLPEAPFVGSFAGDTEAIDWALLWLPEGGELLTESYVNLIPTMQGGTHVNGLRQGLLDAMRDFCEYRNILPRGVKLSADDIWERCAYVLSVKMQDPQFAGQTKERLSSRQCAAFVSGVVKDAFSLWLNQNVQAAEQLAELAISSAQRRMRAAKKVVRKKLTSGPALPGKLADCTSQDLSLTELFLVEGDSAGGSAKQARDREYQAIMPLKGKILNTWEVSSDEVLASQEVHDISVAIGIDPDSEDLSQLRYGKVCILADADSDGLHIATLLCALFVRHFRALVRNGHVYVAMPPLYRIDLGKEVFYALDEEEKAGVLEQLKRKRGKPNVQRFKGLGEMNPLQLRETTLDPNTRRLVQLTISDDDIDHTLAVMDMLLAKKRSEDRRNWLQEKGDTAEIEV

SEQ ID NO: 78170 - protein, 105 aa, Yersinia pestis
MMKLVVSMAVLLSLCSFQVWAKNDIEAGRAKSSSCVACHGMNGKVSVPMYPNLAGQNALYLQQSLEAYKKGSRSGGQAEVMRAYVSGLSDEDFSDLAAYYASLKP

SEQ ID NO: 78171 - protein, 757 aa, Yersinia pestis
MSDLTHDGAERLPLHTFTENAYLNYSMYVIMDRALPFIGDGLKPVQRRIVYAMSELGLNNSAKFKKSARTVGDVLGKYHPHGDSACYEAMVLMAQPFSYRYPLVDGQGNWGAPDDPKSFAAMRYTESRLSKYAEVLLGELAQGTVDWVPNFDGTMQEPKMLPARLPNILLNGTTGIAVGMATDIPPHNVREIAQAVLALIDKPTTSLDELLEFVQGPDFPTEAEIITPRDDIRKIYQNGRGSVRMRAVWKKEDGSAVITALPHQVSGAKVLEQIANQMRAKKLPMVEDLRDESDHENPTRLVIVPRTNRVDLDQVMSHLFATTDLERSYRINMNMIGLDNRPSVKGLLEILTEWLVFRRQTVRNRLNFRLEKVLKRLHILEGLLIAFLNIDEVIHIIRTEDDPKPLLMQRFSISETQAEAILELKLRHLAKLEEVKIRGEQDELAKERDQLQALLASERKLNTLIKKEIQADAAAYGDDRRSPLTERGEAKAMSEHDIVPSEPVTIVLSEMGWVRSAKGHDIDPSGLSYKAGDSFRAAARGMSNQPVVFIDSTGRSYALDPLTLPSARGQGEPLTGKLTPPPGATIEHVLMAPDSQKLLMASDAGYGFVCTFNDLVAKNRAGKTMITLPENAKVLPPLEIYGPDDMLLSITAVGRMLMFPVADLPELSKGKGNKIVSIPAAQAAAGEDRLAWLFVLPPQTSITLHFGKRKLTLRPEDLQKFRAERGRKGSPLPRGLQRIDRIDVDAPPRAIATESEE

SEQ ID NO: 78172 - protein, 572 aa, Yersinia pestis
MRTSQYLLSTQKETPADAEVISHQLMLRAGMIRKLASGLYTWLPTGVRVLKKVENIVREEMNNAGAIEVSMPVVQPADLWQESGRWEQYGPELLRFVDRGERPFVLGPTHEEVITDLIRGEINSYKQLPLNFFQIQTKFRDEVRPRFGVMRAREFLMKDAYSFHTTQESLQETYDAMYTAYSKIFSRMDLNFRAVLADTGSIGGSASHEFQVLAESGEDDIVFSTGSDYAANIEFAEALAPTEPRAPATEELRIVDTPNAKTIAELVEQFKLPIEKTVKTLLVHAHEESGHKLVALLVRGDHDLNEIKAEKLPQVAKPLTFASEEEIRAAIGAGPGSLGPVNLSLPVIADHSVAVMSDFGAGANIDGKHYFGINWERDLALPLVADLRNVVEGDISPDGKGTLQIKRGIEVGHIFQLGTKYSEVMKATVQGEDGRNQVMTMGCYGIGVSRVVAAAIEQNHDDRGIIWPDAIAPFQVAILPMNMHKSFRVKELAEELYTTLRSHGIDVILDDRKERPGVMFADMELIGVPHNIVIGDRNLDSEEVEYKNRRVGEKQMIKTSEIVEFLLSQIKR

SEQ ID NO: 78173 - protein, 235 aa, Yersinia pestis
MSTFSFNQIGVIRSPYKEKFAVPRQPGLVEDGGGELQLLAPYNQPESVRGLSDFSHLWVIFVFHQTMEGGWRPTVRPPRLGGNTRMGVFATRSTFRPNPIGMSLIELKGVRCQNGEVILALGSLDLVDGTPVIDIKPYLPFAESQPQARAGFAQSAPDTEMQVCFSPAAEQQLAHHQQRYPHLRRFISQVLAQDPRPAYRKDDNESREYAVLLLEFNVRWRVIGQQTEVLSLDPR

SEQ ID NO: 78174 - protein, 271 aa, Yersinia pestis
MSLKFKSIAAISALIGTLTLVGCGPTEKAPNHIKVGVIVGAEQQVAEVAQKVAKEKYGLDVELVTFNDYVLPNEALSKGDIDLNAFQHKPYLDQQIKDRGYKLVSVGNSFVYPIAGYSKKIKSLDELQPGSQVALPNDPTNLGRSLLLLQSVGLIKLKDGVGLLPTVLDVVENPKNLKLVELEAPQLPRSLDDQQIALAIINTTYASQIGLTPAKDGLFVEDKESPYVNLIVAREDNKDAENVKKFVQAYQSDEVYDAANKAFNGGAVKGW

SEQ ID NO: 78175 - protein, 277 aa, Yersinia pestis
MTMQPLIKLYDGRLMPQLGLGVWQASIQETELAVSKALEVGYRSIDTAAIYKNEEGVGKALKAAAVARDELFITTKLWNDDQHNPQQALETSLQKLQLDYVDLYLIHWPDPKQDHYVSAWRELVTLKEQGLIRSIGVCNFHIPHLQRLIDETGIAPTVNQIELHPLLQQRQLHAWNATHHIATESWSPLAQGGKGVFDQEIIRKLAQQYNKTPAQIVIRWHLDSGLIVIPKSVTPARIRENFEVFDFKLQKEELLAITKLDCGKRLGPDPEVFGSDR

SEQ ID NO: 78176 - protein, 217 aa, Yersinia pestis
MSEAMMWLMARGVWETLMMTFVSGFFGFVLGLPVGVLLYVTRPGQIIANNKIYRTLSGVVNIFRSIPFIILLVWMIPFTRMIVGTSIGLQAAIVPLTVGAAPFIARMVENALLEIPSGLVEAARAMGATPMQIIKKVLLPEALPGLVNAATITLITLVGYSAMGGAVGAGGLGQIGYQYGYIGYNATVMNTVLVLLVILVYLIQLSGDRIVKAVTHK

SEQ ID NO: 78177 - protein, 188 aa, Yersinia pestis
MTQSVPAIFLDRDGTVNVDHGYVHEIDNFQFIDGVIDACRELKEMGFALVLVTNQSGIARGMFTEEQFLSLTEWMDWSLADRGVDLDGIYFCPHHPDGSVAEFSETCECRKPLPGMLLQAQNELNIDMAASYMVGDKIEDMQAALAANIGTKVLVRTGKPVTAEGEAAADWVLNSLADLPKAIKARYK

SEQ ID NO: 78178 - protein, 267 aa, Yersinia pestis
MSIPVFGLGTFRLQDQIVIDSVSQALTLGYRAIDTAQIYENEAPVGQAIQESGINRDELFITTKIWIANLSKDKLIPSLRESIQKLKTDYVDLTLIHWPSPNDEVSVAEFMSELLKAKGLGLTRQIGISNFTIDLMKQAIAAVGAEEIATNQIELSPLLQNRNVVDFAKQNGIAVTSYMTLAYGKALAEPVIKTIAEQHGATPAQVILSWAMQLGYGVIPSSTKAANLASNLLAQKLCLNAADMALIATLDRNERLVSPDGLAPKWD

SEQ ID NO: 78179 - protein, 277 aa, Yersinia pestis
MRIIFFTLLILLGLIIILKVNSRSRRISVYNKINSRENKSKEANNDTKDKPTVLSDFIKLPVFLSNILYLKVLIVIFILSILTILAIFNVVNINQKTLLTIGLLSIISTLYLPRMIIKNALTKRTNNLLKSLPFFIDITAACVQSGMTIENSLNYTTQKFQTINTDLCLIMSKVTKRAEINGLENAIKELQYYSPAIEMKMFCSTLQYSISFGSTVYEQLTHLSQDMREMQLLMTEESISKLSTKLTLPLFLFILIPFVLLVISPSILELLNYVKNI

SEQ ID NO: 78180 - protein, 410 aa, Yersinia pestis
MTTGIKIMMFMGVLFIKIDITPLSNHGINIYNGGSMQLILNKDLINKKDNREKSAVVIISTRKGLKDKISEYVRLADIKNIKEIDDDIFSAASILIPDNVKGIIIDINENHDINTILDLMKVHTPRDCWCILVGDIDSISIAQQFIERGILYLHIQSQLADLTQNLLKGIQIESDRKAFFISILGCRGGIGTTLLSYQLAHVITQIKKSPTLLLQGNQGSQDLDLITEKKMGEDITGYQKNFDLMRGNERKLSEVNEHNNKKHNFIIFDQPIHNARKEKTLDYISNSNCIILLIDHSMMSVRVAKEFIDTLERFKRDNRQAIRLFICLNENRPITKDMLTTSDIQSLLGHSIDTAIPYINNAKNSLNSPDYFGRKKTKVVELAKQSLGININLSSHTNMWIREKLNKLFK

SEQ ID NO: 78181 - protein, 494 aa, Yersinia pestis
MPNNEKISASSINPHYSPKLTNEDLAPTRKQNWGWYNIFSFWMTDVHSMGGYVVAASFFALGLSSWQVLLSLLVGICIVQICANLVAKPSQIAGVPYAVICRQSFGVFGANIPAVIRGLIAVAWYGIQTYLAGNAFMLVMLKFFPSLIPLAQSQWLGLSTLGWICFSIMWVLQAMVFWHGMNAIKRFIDFAGPAVYVVMLSLALWIVYQTGWSNISFTLASKILSPSEQVWQMLTATALVVSYFAGPLLNFGDFSRYGKSMQEIRRGNRWGLPFNFLLFSLVTVVIVSGSQSLFGEMITDPIETVTRVGNGVAIALGLLTMIIATIGINIVANFVSPAFDFSNCSPQRINFRTGGMIAAVGSVLLTPWNLFQSPIIIHYTLDVLGAFMGPLFGILIADFYLIKRGQLYVDDLFNASSSGRYWYRGGFNPKAIMALLPAVAIGLMIIFIPNLQQISSFSWFIGAFLGGSIYRFIARNDPLPNNAALFIRPEIGKD

SEQ ID NO: 78182 - protein, 556 aa, Yersinia pestis
MKKLILKKIMILSDSGKSARQFEFGEHLTLITADDDNSVGKSTLAKMIFWTFGCEPIFSEVWRTLDCTSIIEFEINNAPYIIHRYKNEIKIRHSNGKLHSFPKITGDYSKYFSELVNFNVLLPKKGQLTLETPPPAYYFIPFYIDQKRTWAKPWDSFENLQQYSSWAKPVISYHSGLFIKAHFEVEKDIYVIKRELEEVEKGVTELNNAVIILRQNLIDTDNVLPSTEFIFSVIQESEKNKKNLLEERTNLRVEKIRLESQIKLAKGIISELDKDYIFSVENMEDGDIECPTCGTIHENSIAHRTSILIDMELAKNQLESLESEVNGIINLLVIKDEEITEQSNKSERSYNNVIESDSNSLISFTNDKFEKRAHEINSKKNITIEIKKSEEKTAKKSQSDILSKEQKSEIKQSFADRLSKYITKLKVNVDISKIKSPLDYKKIYEVGGAAEDARAVLGYYLAIYEQVADSCEEALPPLVIDTPNQQEQASGNYTNIIKSISDGINNDRQYVICAMEHKALEQIKTNAQVIKLDARKILLQDQYEKISKLRNEVIFD

SEQ ID NO: 78183 - protein, 160 aa, Yersinia pestis
MTKKKAYKPGSATIAQNKRARHEYFIEEEFEAGLALQGWEVKSLRAGKANISDSYVMFKNGEAFLFGATITPLNVASTHVVCEPMRTRKLLLNKRELDSLFGRVNREGYTVVALSMYWKNAWVKVKIGVAKGKKDNDKRDDIRDREWKLDKARIMKHANR

SEQ ID NO: 78184 - protein, 293 aa, Yersinia pestis
MNNRRFDCIGIVGHPRHPAALATHEILYHWLKARGYAVMVEQQIAHDLNLTDAITGSLADIGQKADLAVVVGGDGNMLGAARVLARYDIKVIGVNRGNLGFLTDLDPDNALQQLSDVLEGEYLSEQRFLLETHVRRTNQQSRISTAINEVVLHPGKVAHMIEFEVYIDDRFAFSQRSDGLIIATPTGSTAYSLSAGGPILTPTLDAIVLVPMFPHTLTARPLVISSSSTIRLKFSHITSDLEISCDSQIALPIQEGEEVLIRRSDFHLNLIHPKDYSYFNTLSTKLGWSKKLF

SEQ ID NO: 78185 - protein, 426 aa, Yersinia pestis
MADKKATLNLGEAAIELGVLSPTLGTDVIDVRTLGSKGYFTFDPGFTSTASCESKITYIDGDQGILLHRGFPIAQLAKDSTYLEVCYILLYGETPTPEEYKTFKTTVTRHTMIHEQITRLFHGFRRDSHPMAVLCGVTGALAAFYHDALDVNNERHREITAFRLLSKMPTVAAMCYKYSLGQPFVYPRNDLSYAGNFLHMMFSTPCEKYEVNPVLERAMDRILILHADHEQNASTSTVRTAGSSGANPFACIAAGIASLWGPAHGGANEACLKMLEEIKTVEHIPEFIRRAKDKNDSFRLMGFGHRVYKNYDPRATVMRETCHEVLEELKLNNSLLEVAMELENIALNDPYFIEKKLYPNVDFYSGIILKAMGIPSSMFTVIFAIARTIGWIAHWNEMHNDGIKIARPRQLYTGYTERDFQSQLKK

SEQ ID NO: 78186 - protein, 588 aa, Yersinia pestis
MNLPIREFDAVVVGAGGAGMRAALQISQMGLSCALISKVFPTRSHTVSAQGGITVALGNTHEDNWEWHMYDTVKGSDYIGDQDAIEYMCKTGPEAVLELEHMGLPFSRLEDGSIYQRPFGGQSLNFGGGQAARTAAAADRTGHALLHTLYQQNLKNHTTIFSEWYALDLVKNQDGAFVGCTAINIETGEVVYFKARATILATGGAGRIYQSTTNAHINTGDGVGMALRAGVPVQDMEMWQFHPTGIAGAGVLVTEGCRGEGGYLLNKHGERFMERYAPNAKDLAGRDVVARSIMIEIREGRGCDGPWGPHAKLKLDHLGKDVLESRLPGILELSRTFAHVDPIKEPIPVIPTCHYMMGGIPTKVTGQAITVNEKGEDVVIPGLFAVGEIACVSVHGANRLGGNSLLDLVVFGRAAGMHLQESLMEQGASRDASESDIEASLARMNRWNNTRSGEDPVEIRKALQACMQNNFSVFREGDAMAKGLEELKTIRERLQNARLDDTSSEFNTQRIECLELDNLMETAFSTAVSANFRTESRGAHSRFDFPDRDDVNWLCHSLYLPGTESMTRREVNMQPKLREAFPPKVRSY

SEQ ID NO: 78187 - protein, 935 aa, Yersinia pestis
MQNGAMKAWLDSSYLAGANQSYIEQLYEDFLTDPGSVDDSWRSIFQQLPTTGVKPDQLHSQTREYFRRLAKDSTRYNSSINDPDIDAKQVKVLQLINAFRFRGHQHANLDPLGLWKQESVPDLDPSYHNLTEADFQNTFNVGSFAIGKETMKLADLYAALKQTYCGSVGAEYMHITNTEEKRWIQQRIESVVGKPTFSDAEKRRFLSELTAAEGLERYLGAKFPGAKRFSLEGGDSLVTMLKEMIRHAGKNGTREVVLGMAHRGRLNVLINVLGKKPEDLFDEFAGKHKEHLGTGDVKYHQGFSSDVETEGGLVHLALAFNPSHLEIVSPVVIGSVRARRDRLDEARSNMVLPITIHGDAAITGQGVVQETLNMSQARGYEVGGTVRIVINNQIGFTTSNPLDARSTQYCTDIAKMVQAPIFHVNADDPEAVAFVTRLALDFRNTFKRDVMIDLVCYRRHGHNEADEPSATQPVMYQKIKKHPTPRKIYADKLIEQNIASLEDATEMVNLYRDALDHGDCVVEEWRPMNLQSFTWSPYLNHEWDEAYPSKVEMKRLQELARRISSAPEAIEMQSRVAKIYSDRALMASGEKPFDWGGAETLAYATLVDEGIPIRLSGEDAGRGTFFHRHAVIHNQKNGSVYVPLSNIHSGQGDFQVWDSVLSEEAVLAFEYGYATAEPRTLTIWEAQFGDFANGAQVVIDQFISSGEQKWGRMCGLVMLLPHGYEGQGPEHSSARLERYLQLCAEQNMQVCIPSTPAQVYHMIRRQALRGMRRPLIVMSPKSLLRHPLATSSLDELANGSFLPAIGEIDELDPKGIKRVVMCSGKVYYDLLEQRRKNGQTDVAIVRIEQLYPFPHQAVQSVLEQYAHVHDFVWCQEEPLNQGAWYCSQHNFREVIPFGASLRYAGRPASASPAVGYLSVHQKQQQALVNDALNVE

SEQ ID NO: 78188 - protein, 290 aa, Yersinia pestis
MSILIDKNTKVICQGFTGSQGTFHSEQAIAYGTKMVGGVTPGKGGTQHLGLPVFNTVREAVETTGATASVIYVPAPFCKDSILEAIDAGIKLIICITEGIPTLDMLVVKVRLEQSDARMIGPNCPGVITPGECKIGIMPGHIHLPGKVGIVSRSGTLTYEAVKQTTDIGFGQSSCVGIGGDPIPGSNFIDILKLFQEDPQTEVIVMIGEIGGNAEEEAAAYIKEHVTKPVVGYIAGVTAPKGKRMGHAGAIIAGGKGTADDKFAALEAAGVKTVRSLAEIGNAVKAVLPQ

SEQ ID NO: 78189 - protein, 522 aa, Yersinia pestis
MFDIVELSRLQFALTAMYHFLFVPLTLGLAFLLAIMESVYVLSGKQIYKDMTKFWGKLFAINFALGVATGLTMEFQFGTNWSYFSHYVGDIFGAPLAIEGLMAFFLESTFVGLFFFGWDRLTKHQHLAVTWLVALGSNFSALWILVANGWMQNPIASDFNFETMRMEMLSFSELVLNPVAQVKFVHTVAAGYVTGAMFILGISSYYLLKGRDIPFAKRSFAIAASFGLASVLSVIVLGDESGYEMGDVQKTKLAAIEAEWETQPPPAAFTLFAIPNQETMENRFAIQIPYALGLIATRSLDTPVIGLRDLMSQHEVRIRNGIQAYSLLEQLRGGNTDPAVRDAFNKAKQDLGYGMLLKRYTENVADATEEQIQLAAQDSIPRVLPLYFAFRIMVACGFLMLLIIGLAFYNVVRGRIGEKKWLLRAALYGIPLPWIAVEAGWFVAEYGRQPWAIGEVLPTAVANSSVTAGEILFSMALICGLYTLFLIAEMYLMFKFARLGPSSLKTGRYHFEQPTAPVQEAR

SEQ ID NO: 78190 - protein, 388 aa, Yersinia pestis
MGKATEQNDKLNRAVIVSVVLHIILIALLIWGSLTQTTEMGGGGAGGEVIDAVMVDPGAVTEQYNRQQQQQTDAKRAEQQRQKKAEQQAEELQQKQAAEQQRLKELEKERLQAQEDAKLAAEEQKKQVAEQQKQIAEQQKQAAEQQKIAAAAVAKAKEEQKQAETAAAQAKAEADKIVKAQAEAQKKAEAEAKKEAAVAAAAKKQADADAKKAVEVAEKAAADAAEKKAAADAEKKAAAAKKVAAAAEAKKKAAAEAAASTDVDDLFGGLANAKNAPKSGSGAGAAAAGKGGGKKSGASGADISGYLGQITGAIQSKFYDADLYKGRTCDLRIKLAPDGLLIDVKAEGGDPALCQAAIAAAKQAKIPKPPSTDVYEQFKNAPLVFKPQ

SEQ ID NO: 78191 - protein, 269 aa, Yersinia pestis
MNSNFRRHLVGLSLLVGVAVPWAATAQAPISNVGSGSVEDRVTQLERISNAHSQLLTQLQQQLSDSQRDVDSLRGQIQESQYQLNQVVERQKQIYQQMESLSGGQGAQNSASAASGATADNTAAGSSGNADAGAAASTAAPAASTGDENSDYNVAVSLALEKKQYDQAITVFQSFVKQYPKSTYQPNANYWLGQLYYNKGKKDDAAYYYAVVVKNYPKSPKSSEAMFKVGVIMQDKGQSDKAKAVYQQVIKQYPNTDAAKQAQKRLSAL

SEQ ID NO: 78192 - protein, 360 aa, Yersinia pestis
MMKRNILAVVIPALLAAGAANAAEIYNKDGNKLDLYGKVDARHSFSDNNKQDGDKSYVRFGFKGETQITDQLTGYGQWEYNIQANNAEDTGAQDGNATRLGFAGLKFAEFGSFDYGRNYGVIYDVNAWTDMLPVFGGDSISNSDNFMAGRSTGLATYRNNNFFGLVDGLNFALQYQGKNDRSEVKEANGDGFGIGSTYDIGNGINFGAGFSSSNRTLDQKYGSTAEGDKAQAWNVGAKYDANNVYLAVMYAETQNLTPYGSFSDTIANKTRDIEITAQYQFDFGLRPSLGYVQSKGKDLNDVDANHDLLKYVSVGTYYYFNKNMSTYVDYKINLLDEDEFTIANGLNTDNVVAVGLVYQF

SEQ ID NO: 78193 - protein, 466 aa, Yersinia pestis
MSVVPVVDVLQGRAAVGSEVTVRGWVRTRRDSKAGISFVAVYDGSCFDPLQAVVNNTLPNYQDEVLHLTTGCSVEVTGTVVASPGEGQSFEIQATAINVVGWVDDPDTYPMAAKRHSIEYLREVAHLRPRTNLIGAVARVRHTLAQAIHRFFDENGYFWVSTPLITASDTEGAGEMFRVSTLDLENLPRTDTGAVDFSEDFFGKEAFLTVSGQLNGETYACALSKVYTFGPTFRAENSNTSRHLAEFWMVEPEVAFASLDDVAGLAEKMLKYVFQAVLNERADDMKFFAERVDKDAVDRLQRFVTSDFAQVDYTDAIEILLASGQKFENDVSWGIDLSSEHERYLAEKHFKAPVVVKNYPKDIKAFYMRMNEDGKTVAAMDVLAPGIGEIIGGSQREERLDVLDARLAEMGLNKEDYWWYRDLRRYGTVPHSGFGLGFERLISYVTGVQNVRDVIPFPRTPRNASF

SEQ ID NO: 78194 - protein, 401 aa, Yersinia pestis
MTQDASPILTSLLDTDAYKLHMQQAVFHHYRHITVAAEFRCRSDELLGVYADEIRHQVTLMGQLALTSDEFIYLSSLPFFQDDYLHWLRDFRFKPEQVSVAVHDGKLDIRIAGLWCEVIMWEVPLLAVISEIVHRRRSTQVTTDQAVQQLRTKLEQFNALSADIDITHFKLMDFGTRRRFSREIQHTVVSTLKDEFPYLVGTSNYDLARTLALAPVGTQAHEWFQAHQQISPTLANSQRVALQVWLDEYPNQLGIALTDCITMDAFLRDFDLAFANRYQGLRHDSGDPIEWGEKAIAHYEKLGIDPMKKVLVFSDNLDLEKALFLYRHFYQRIKLVFGIGTRLTCDIPDVKPLNIVIKLVECNDKPVAKLSDSPGKTICQDPAFVDQLRKAFALPLVKKAS

SEQ ID NO: 78195 - protein, 871 aa, Yersinia pestis
MTQQPQAKYRHDYRAPDYTITDIDLDFALDAQKTTVTAVSKVKRQGTDVTPLILNGEDLTLISVSVDGQAWPHYRQQDNTLVIEQLPADFTLTIVNDIHPATNSALEGLYLSGEALCTQCEAEGFRHITYYLDRPDVLARFTTRIVADKSRYPYLLSNGNRVGQGELDDGRHWVKWEDPFPKPSYLFALVAGDFDVLQDKFITRSGREVALEIFVDRGNLDRADWAMTSLKNSMKWDETRFGLEYDLDIYMIVAVDFFNMGAMENKGLNVFNSKYVLAKAETATDKDYLNIEAVIGHEYFHNWTGNRVTCRDWFQLSLKEGLTVFRDQEFSSDLGSRSVNRIENVRVMRAAQFAEDASPMAHAIRPDKVIEMNNFYTLTVYEKGSEVIRMMHTLLGEQQFQAGMRLYFERHDGSAATCDDFVQAMEDVSNVDLSLFRRWYSQSGTPLLTVHDDYDVEKQQYHLFVSQKTLPTADQPEKLPLHIPLDIELYDSKGNVIPLQHNGLPVHHVLNVTEAEQTFTFDNVAQKPIPSLLREFSAPVKLDYPYSDQQLTFLMQHARNEFSRWDAAQSLLATYIKLNVAKYQQQQPLSLPAHVADAFRAILLDEHLDPALAAQILTLPSENEMAELFTTIDPQAISTVHEAITRCLAQELSDELLAVYVANMTPVYRIEHGDIAKRALRNTCLNYLAFGDEEFANKLVSSQYHQADNMTDSLAALAAAVAAQLPCRDELLAAFDVRWNHDGLVMDKWFALQATSPAANVLVQVRTLLKHPAFSLSNPNRTRSLIGSFASGNPAAFHAADGSGYQFLVEILSDLNTRNPQVAARLIEPLIRLKRYDAGRQALMRKALEQLKTLDNLSGDLYEKITKALAA

SEQ ID NO: 78196 - protein, 637 aa, Yersinia pestis
MSLISMSGAWLSFSDAPLLDNTELHIEANERVCLVGRNGAGKSTLLKILSKEVALDDGRIIYEQDLIVARLQQDPPRNVAGTVFDFVAEGVQEQAEHLKAYHATLHQVELDPSEKNLNRLAALQEILDHQGLWQLDSRIQEVLVQLGLSADAELSSLSGGWLRKAALGRALVSSPKVLLLDEPTNHLDIETINWLEGFLKEFQGSIVFISHDRSFIRAMATRIVDLDRGKLVSWPGNYELYLASKEEALRVEELQNAEFDRKLAQEEVWIRQGIKARRTRNEGRVRALKALRMERSQRREVMGTAKMQVEETVRSGKIVFDLENVNYQIDGKVLVKDFTAQVQRGDKIALVGPNGCGKTTLLKLMLGQLNADSGKVHCGTKLEVAYFDQHRAELDPERTVMDNLAEGKQEVMVNGRSRHVLGYLQDFLFHPKRAMTPVKALSGGERNRLLLAKLFLKPSNLLILDEPTNDLDVETLELLEEMVDSYQGTVLLVSHDRQFVDNSVTECWIFEGNGQINSFVGGYYDAHQQRAEAKPIRQAALKIEETKASTSVKSPAPAAKKPGKLSYNLQRELDQLPQQLEKLENDISKLQAEVSDTDFFSRPHEETQQVLKTLADTEQALEVAFSRWEELEAQKNG

SEQ ID NO: 78197 - protein, 259 aa, Yersinia pestis
MKNQYGKVSYWVAGAVLLTAFSGPAFAADKITVFAAASLTNALQDIAVQYKQEKQVDVVASYASSSTLARQIEQGAPADLFISADQQWMDYAIDKQQIVANTRYTLLGNELVLIAPQDSQIDKVEIDKKTDWKKLLEGGRLAVGDPDHVPAGIYAKESLENLGAWSTLAPEMARANNVRSAMALVERAEAPLGIVYGSDAVASKKVKVVGIFPEASHKPVEYPMAIVKGHDNPTVTAFYDYLKSPAAAVIFKNYGFTPR

SEQ ID NO: 78198 - protein, 359 aa, Yersinia pestis
MLELNFSQQLGDLHLQVATDLPAQGITAIFGLSGAGKTSLINVIGGLTRPQQGRVILNGRVLVDAEKNIYLPPEKRRVGYVFQDARLFPHYRVRGNLQYGMAASMRGQFDAIVGLLGIEPLLNRFPFTLSGGEKQRVAIGRALLTAPELLLMDEPLASLDLPRKRELLPYLERLAQDVNTPILYVSHSMDEILRLADQVVVMDAGKVRAVGGLEEVWASSALRPWLQREEPSSILRVSVIGHHDRYAMTALALGDQRLWVGKLDAAEGNSMRIRINAADVSLALQPPHSSSIRNILPVKVAECLDVDGQVDVKLAIGEQWLWARITPWARDELGLKPGQWVYAQIKSVSFNRQNGPVPD

SEQ ID NO: 78199 - protein, 644 aa, Yersinia pestis
MAKNLILWLVIAVVLMSVFQSFGPSESNGRRVDYSTFMSDVTQDQVREARINGREINVSKKDNSKYTTFIPVNDPKLLDTLLTKNVKVVGEPPEEQSLLASIFISWFPMLLLIGVWIFFMRQMQGGGGKGAMSFGKSKARMLTEDQIKTSFADVAGCDEAKEEVSELVDYLREPSRFQKLGGKIPKGVLMVGPPGTGKTLLAKAIAGEAKVPFFTISGSDFVEMFVGVGASRVRDMFEQAKKAAPCIIFIDEIDAVGRQRGAGLGGGHDEREQTLNQMLVEMDGFEGNEGIIVIAATNRPDVLDPALLRPGRFDRQVVVGLPDVRGREQILKVHMRRVPLDTDIDASVIARGTPGFSGADLANLVNEAALFAARGNKRVVSMVEFEKAKDKIMMGAERRSMVMTEAQKESTAYHEAGHAIIGRLVPEHDPVHKVTIIPRGRALGVTFFLPEGDAISASRQKLESQISTLYGGRLAEEIIYGPEKVSTGASNDIKVATSIARNMVTQWGFSEKLGPLLYAEEEGEIFLGRSVAKAKHMSDETARIIDQEVKLLVERNYQRARKLLLENMDVLHSMKDALMKYETIDAPQIDDLMNRKEVRPPAGWDNVTKNKSSDNDNTPTATMPADEPNTPTSGNTVSEQLGDK

SEQ ID NO: 78200 - protein, 422 aa, Yersinia pestis
MTPSDLVFDQQHIWHPYTSMTEPLPCYPVVGAEGVELQLADGRRLIDGMSSWWAAIHGYNHPVLNFAAHQQLDKMSHVMFGGITHPPAVKLCRQLVAMTPPPLECVFLADSGSVSVEVALKMALQYWQAKGERRQRILTLRHGYHGDTFGAMSVCDPQNSMHSLYQGYLAENLFANAPQCGFDDPWDPQDIANFVALITQHANEIAAVILEPVVQGAGGMRIYHPSYLREVRALCDKHQILLIADEIATGFGRTGKLFACEHAQIVPDILCLGKALTGGYLTLSATLTTRAVAETISKGDAGCFMHGPTFMANPLACAVASANLSLLAENSWQQQVSKIEDQLKRELLPLAQEDTVADVRVLGAIGVVEMKKPVNVARLQRSFVEQGVWIRPFGKLIYLMPPYIISQHALTRLTAAVVDRGS

SEQ ID NO: 78201 - protein, 345 aa, Yersinia pestis
MATYHHWTVGQALALFDKPLLELLFEAQQVHRQHFDPRQVQVSTLLSIKTGACPEDCKYCPQSSRYKTGLESERLMQVEQVLESAKKAKAAGSTRFCMGAAWKNPHERDMPYLAKMVEGVKALGMETCMTLGSLSKQQAHRLADAGLDYYNHNLDTSPEFYGSIITTRSYQERLDTLNEVRDAGIKVCSGGIVGLGETVRDRAGLLVQLANLPKPPESVPINMLVKVKGTPLENNAEVDAFEFIRTIAVARIMMPSSYVRLSAGREQMNEQTQAMCFMAGANSIFYGCKLLTTPNPDEDKDLQLFRKLGLNPQQTATSHGDREQQQALTEQLLHGDTAQFYNAAV

SEQ ID NO: 78202 - protein, 482 aa, Yersinia pestis
MHFSRIVSGLACSIILNISVSNANAAQVENYTQYLPDGANLALMVQKIGASTPAIDYHAQQMALPASTQKVLTALAALLQLGPDFRFNTTLESHGTITDGVLRGNLIARFGGDPTLTRQQLRNMVATLRKAGVKQIAGDVVIDTSVFASHDKAPGWPWNDMTQCFSAPPAAAIVDRNCFSVSLYSAPNPGDTAFIRVASYYPVQMFSEVRTLAKGSPDAQYCELDVVPGELNRFTLTGCLTQRSEPLPLAFAVQNGASYAGAILKDELKKADIQIDGNLRRQTIPSPAGNVLAQTQSAPLHDLLKIMLKKSDNMIADTVFRTIGHQRFGVPGTWRSGADAVRQILRQKAGVDLGNSIVVDGSGLSRHNLISPATMMQVLQYIAQNDQELNFISMLPLAGYDGTLRYRGGLHEAGVNGKVSAKTGALQGVYNLAGFITTASGQRMAFVQFLSGYAVPPEDQKNRRAPLVRFESRLYKDIYQNN

SEQ ID NO: 78203 - protein, 590 aa, Yersinia pestis
MTIASITLTNNRLEWQSLLPNTTPYEALFATASQLEPVAFSAYQPRLENGMTLFCHPQSQPRFMLIKAQESTDYLALIAQAVKALQPEASNLLGGDYLVHGHHVTWQSAQHGDERFAAQSTCLYQEWVEPEQLFGCVRMYKDQITLQPGLVHQVNGGVLILSVRALQAQPLMWLRLKQMIVQQRFDWLSTDETRPLPVHIPSMPLDLRLILVGDRLGLADFHDMEPELGDLAIYGEFEAELPLVDIEGMALWCGYINTLLQQKQLPALSADAWPVLFRQAVRYSGDQGSLPLCPQWLTQQLAEAALYAENDTISANALEAALNARNWRQNYLAERMQDEIELGQILVETEGHVVGQINALSVLEYPGHPHAFGEPARISCVVHLGDGEFVDVERKAELGGNIHAKGMMIMQAFLMSELELDQPLPFSASIVFEQSYGEVDGDSASLAELCALVSALSQQPINQQIAVTGSVDQFGNVQPIGGVNEKIEGFFETCQRRGLTGNQGVILPTTNVRHLCLNQAVVEAVQKGQFHLWAVDTVAEALPLLTGVTYDDEQQPSLLGAIQERIAQINPQDKRRWPWPLRWLNWFNQG

SEQ ID NO: 78204 - protein, 390 aa, Yersinia pestis
MKFVDEAAILVVAGDGGNGCVSFRREKYIPNGGPDGGDGGDGGDIYLLADENLNTLIDYRFVKSFRAERGQNGQSRDCTGKRGKDITIKVPVGTRVLDQGTGEIVGDMVRHGQRLMVAKGGFHGLGNSRFKSSVNRAPRQKTMGTEGETRELMLELLLLADVGMLGLPNAGKSTFIRAVSAAKPKVADYPFTTLIPSLGVVRMDYEQSFVIADIPGLIEGASDGAGLGIRFLKHLERCRVLLHLVDLAPIDESDPAENAKVIVNELQQYSENLAEKPRWLVFNKIDLIDPEEAEKRAKAIVETLGWEGKYYMISAANRDNVNALCWDVMSFLNSQPKAMAIAESVPEKVEFMWDDYHREQLAEVEAEAEDDWDDDWDEEDDDGVEIIYER

SEQ ID NO: 78205 - protein, 85 aa, Yersinia pestis
MAHKKAGGSTRNGRDSESKRLGVKRFGGEAVLAGSIIVRQRGTKFHAGINVGCGKDHTLFALADGKVKFEVKGPKNRKFISIEAE

SEQ ID NO: 78206 - protein, 307 aa, Yersinia pestis
MRNRTLADLERVVALGGGHGLGRVMSSLSSLGSRLTGIVTTTDNGGSTGRIRRSEGGIAWGDTRNCLNQLITEPSVASAMFEYRFTGNGELAGHNLGNLMLKALDHLSIRPIEAINLVRSLLKVDALLIPMSEQPVDLMAIDHEGHPIYGEVNIDQLAQMPQEMLLSPPVHATREAVEAINQADVILIGPGSFLTSLMPLLLLDELTQALRRSSASMIYIGNLGRELSPAAAALSLQDKLTIMESKIGRKIIDAVIVSPTIDISGVKDRIIVQQPLEAKDIPHRHDRELLRQALENTLQQLNGADSV

SEQ ID NO: 78207 - protein, 103 aa, Yersinia pestis
MYAVFQSGGKQHRVSEGQTIRLEKLDIATGETIEFDQVLMIANGEEINIGAPLVDGGKIKAEIIAHGRGEKIKIVKFRRRKHYRKQQGHRQWFTDVKITGISA

SEQ ID NO: 78208 - protein, 326 aa, Yersinia pestis
MVQLTDAFARKFYYLRLSITDVCNFRCTYCLPEGYRPDGVKSFLSLDEINRVSRAFALLGTEKIRLTGGEPSMRRDFTDIIATIRQNPAIRTLAVTTNGYRLVRDVAQWRDAGLTAINVSVDSLDPRQFHAITGQDKFYQVMQGIDAAFDAGFDKVKVNAVLMRDVNDRQLSAFLDWIKPRPIQLRFIELMETGEGGNLFRKHHVSGGVIRQQLLEQGWQQQDRARSDGPAQVFHHSDYQGEIGLIMPYEKDFCASCNRLRVSALGNLHLCLFGEQGITLRDLLGSDDQQDELIARIQSALQTKKQTHFLHQGNSGITQNLSFIGG

SEQ ID NO: 78209 - protein, 323 aa, Yersinia pestis
MNLEKIIELTAPDMAAVNTTILDQLNSDVVLINQLGHYIISGGGKRIRPMISVLVARALNYQGSKHITVAALIEFIHTATLLHDDVVDESDMRRGKATANAAFGNAASVLVGDYIYTRSFQMMTGLQSMRVLTLMSEATNVIAEGEVLQLMNCNNPDITEESYMQVIYSKTARLFEAAAQSAAILSDASEEQELALQNYGRYLGTAFQLIDDLLDYSAEGSTLGKNTGDDLNEGKPTLPLLHAMHNGTPEQAAMIRQAIEQGNGRHLLEPVLAAMEHCGSLVYTRQRAEEEADKAIAALHALPESDYRLALEGLAHISVHRRF

SEQ ID NO: 78210 - protein, 567 aa, Yersinia pestis
MEYDYIIIGAGSAGNVLAARLTEDADVTVLLLEAGGPDYRLDFRTQMPAALAFPLQGKRYNWAYETDPEPHMNNRRMECGRGKGLGGSSLINGMCYIRGNAMDFDHWASLSGLEDWSYLDCLPYFRKAETRDIGPNDFHGGEGPVSVTTPKIGNNPLFHAMVAAGVQAGYPRTDDLNGYQQEGFGPMDRTVTPKGRRASTARGYLDQARPRNNLTIITHALTDRILFEGKRATGVRYLKGDAGTGQTAYARREVLLCGGAIASPQILQRSGIGPAELLQRLDIPLVQALPGVGENLQDHLEMYLQYSCKQPVSLYPALLWFNQPKIGIEWLFNGTGVGASNQFEAGGFIRSRDAFTWPNIQYHFLPVAINYNGSNAVKEHGFQAHVGSMRSPSRGRIQVKSKDPRQHPSILFNYMSSEQDWHEFRDAIRITREIIAQPALDPYRGREISPGANVQNDDELDAFIREHAETAYHPSCSCKMGDDKMAVVDGQGRVHGVQGLRVVDASIMPQIITGNLNATTIMIAEKIADRIRGCQPLAKSNAAYFIAGDTPARTSPVRHSLPVTSYP

SEQ ID NO: 78211 - protein, 490 aa, Yersinia pestis
MSRYGLQKLYINGAYTDSTSGDTFDAVNPANGECIAQLQAANAQDVDKAVAAAKQGQPVWAAMTAMERSRILRRAVDILRDRNDELAAIETADTGKPLSETRSVDIVTGADVLEYYAGLIPALEGQQIPLRGSAFVYTRREPLGVVAGIGAWNYPLQIALWKSAPALAAGNAMIFKPSEVTSLTALKLAGIYTEAGLPAGVFNVLTGSGDQVGQMLTEHPGIAKVSFTGGIASGKKVMANAAGSTLKDVTMELGGKSPLIIFADADLDKAADIAMMANFYSSGQVCTNGTRVFVPQALQAAFEQKIVERVKRIHIGDPSDERTNFGPLVSFQHRDSVMRYIDSGKREGATLLIGGYSLTEGALAHGAYVAPTVFTHCRDDMQIVREEIFGPVMSILSYQSEEEVIRRANDTEYGLAAGVVTQDLNRAHRVIHQLQAGICWINTWGESAPEMPVGGYKHSGVGRENGISTLEHYTQIKSIQVELGSFNSVF

SEQ ID NO: 78212 - protein, 396 aa, Yersinia pestis
MTVRLILAKGREKSLLRRHPWIFSGAVQRLEGDALSGETIDILDSQGKWLARAAYSPESQILARVWTFQQDEVIDCAFFIRRLQQAQNWRDWLAQRDGLNGYRLIAGESDGLPGITIDRFQNFLVLQLLSAGAEYQRETLVSALQHCYPECSIYDRSDVSVRKKEGLPLTQGLICGEMPPALLPISENGMQLFVDIQQGHKTGFYLDQRDSRLAARNYANGRRVLNCFSYTGAFAVAALMGNCQQVISVDTSQSVLDIAKQNIELNQLDLSKTEFVRDDVFQLLRSYRAQGEKFDLIIMDPPKFVENKSQLASACRGYKDINMLAIQLLRPGGILLSFSCSGLMPVDLFQKILADAALDAGHDIQFIEQFRQAADHPVIAAYPEGLYLKGFACRVM

SEQ ID NO: 78213 - protein, 1305 aa, Yersinia pestis
MKWVKRLSIAFLLIILLLVGALGGLLGTTSGLHFLINSAARWVPGLDIASVSGGWRGLTLTGIQYQMPGVTVKAGQFYLSLQLSCLKNSELCVNALTAQDIDVVVNTQAMPPTSSTPASTDPMGELSTPYPIFLRLLSLNNVKVTIDDTAISLDEFRTGAHWKQRSLALMPTKINGLLIALPKTVSAGVPDAVKPAVETAMAAKEAVAQLSAAPGRSATASGQSTTASGRSATASGQSATTGGQLATVPAEPATPLGESLKALFAKPLLPALPDFRLPLDLQIEEISGQQLRLTGDNEVLISSLLLQASTQDQRITLDTLEIKSPQGGLSAQGQATLADKWPLDLVVNSALNIDSLKGEKVKLTVGGALREELKVTLNLSGPVSAQLETETSLAKAGLPLSLTLQSKQLRWPLTGEPQYQMNNLRMRLNGQATDYALSIRSDIKGTDLPPAVFTLEGKGNVEQFNLTRLRLAALQGHTDLTGVVDWRQAISWNSVLTLSGINMAKQWPEWPAKLEGKIVTRGSIHGGSWQLQVPELVLDGNVKQNRVTARGSLTGNAAGQWHIPGINLALGRNKLDMKGELNDNWLLDANVDAPQLDGALPGLGGVVKGSLKLRGNLKTPQLLADLTANRLQWQELHINRIKVDGDVRSTDQIQGQLAVRVEQLKQADFVVSLLTLDARGSEKQHQLRLNMQGDPVSGQLSLEGSFDKQQQRWRGTLNNTRFDTPVGEWRLSRAMTLDYQNSAQRITIGPHCWLNPNAELCAPRPIEAGPSGQASVVLNRFDLAMIKPFLGPDTTMNGVFTGRAEVSWKEGGKLPDVRVSLSGNGVKVQQMVQGSPLPIAFETLNLNGGLANGQVRADWLVKLVNNGQFSGQVQVADPEGRRNLSGNVAISNLSLAMINPILSDGEKAAGILNANLRLAGNAKSPLVYGRLALDKVDIDGSWMPFDITEGRLAMNFDGMTSTLEGLIRTSQGQLNLSGDADWRDISAWHARIAAKGNKLRVTIPPTARVDVSPDIVFEATPQLFTLNGSVDIPWARITVQEVPETAVGVSSNEVMLNDQLQPIAPRSASIPISSNLVIRIGNDVRLNAFGLKARLQGDLRMMQDQRGLGLNGQINIPSGSFRAYGQDLIVNKGILLFSGPPDQPLLNIEAIRNPDSTANGVIAGVRVTGMADSPRMEVFSDPAMSQQEALSYLLRGQGLGNSGADSSMMTSMLIGMGVAQSGKLVGKIGEAFGVSNLALDTQGVGDSSQVVVSGYVTKDLQIKYGVGIFDSLATLTLRYRLMPRLYLEAVSGIDQALDLLYQFEF

SEQ ID NO: 78214 - protein, 443 aa, Yersinia pestis
MLNSILLILFLIAVSAFFSLSEISLAASRKIKLKLLADEGDTNALRVLKLQETPGMFFTVVQIGLNAVAILGGIVGDAAFSPSFKLVFERFMAPELADQASFVCSFVLVTSLFILFADLTPKRIGMISPEAVAVRIVNPMRFCLMIFRPLVWFFNGMANLIFRLFKLPMVRNDDITSDDIYAVVEAGALAGVLRKQEHELIENVFELESRTVPSSMTSRENVIYFDLRESEDSIKDKISTHPHSKFLVCDGHIDQVVGYVDSKDLLNRVLGNQSLVLSSGVQIRSALIVPDTLTLSEALESFKTAGEDFAVILNEYALVVGIITLNDVMTTLMGDLVGQGQEEQIVARDENSWLIEGGTPIEDVMRVLHIDDFPQSGNYETIGGFMMYMLRKIPKRTDFVKYAGYKFEVVDIDSYKIDQLLVTRLSDQPAPILPKAPHESSDA

SEQ ID NO: 78215 - protein, 221 aa, Yersinia pestis
MDYRNQSLGALAIAIPRATKLFRQHQLDFCCGGKQTLLRAANKLNLDIDALEAQLSALQTEPHSSEDWQQQPLTNLISFIISRYHDRHREQLPELVLMAEKVERVHGEKPTCPRGLAAELSAILEELTQHMYKEEQILFPMIQRGMGSQASGPIFVMEAEHDAVGQQLDVVKQLTQNVTPPEGACNTWRALYTGINEFITDLMEHIHLENNLLFPRALRGE

SEQ ID NO: 78216 - protein, 150 aa, Yersinia pestis
MQVILLDKVANLGSLGDQVNVKAGYARNFLVPQGKAVPATKKNVEFFEARRAELEAKLADVLAAAEARATKINELVSVTISSKAGDEGKLFGSIGTRDIADAVTAAGVEVAKSEVRLPNGVLRTAGEHEVHFQVHSDVFAKLNVVVVPEA

SEQ ID NO: 78217 - protein, 75 aa, Yersinia pestis
MARYFRRRKFCRFTAEGVVEIDYKDIATLKNYITESGKIVPSRITGTRAKYQRQLARCIKRARYLSLLPYTDRHQ

SEQ ID NO: 78218 - protein, 106 aa, Yersinia pestis
MVTTNRLVLSGTVCKTPVRKVSPSGIPHCQFVLEHRSTQQEAGFSRQTWCRMPIVVSGQQSQALTHSITVGSQLTVEGFISCHQGRNGLNKLVLHAEQIEFIDSGD

SEQ ID NO: 78219 - protein, 130 aa, Yersinia pestis
MRHYEIVFMVHPDQSEQVPGMIERYSATITNAAGTIHRLEDWGRRQLAYPINKLHKAHYVLLNVEAPQEAIDELETNFRFNDAVIRSMVMRVKHAVTEASPMVKAKDERRERHDFASEANDDSEAGDSEE

SEQ ID NO: 78220 - protein, 332 aa, Yersinia pestis
MANMFALILAIATLLTGIIWCFERFKWGPARQAKIAAVNAQTAEIKAQTGCAVDNKTLAQAAKQPGWIETCASIFPVLALVFIVRSFIYEPFQIPSGSMMPTLLIGDFILVEKFAYGIKDPITQTTLIPTGKPNRGDIAVFKYPLDPRLDYIKRVVGLPGDRVIYNPISKEVTVQPSCNTGTSCDSALAITYSTSEPSEFVQTFRYSGNGESSAGFFPIPLNQAVPDGGVRLRERTESLGPVAHHILTVPGRQDPLGSYYQQPDQPLGVWVVPEGHYFMMGDNRDNSADSRFWGFVPERNLVGKATAIWMSFEKQEGEWPTGVRLSRIGGIH

SEQ ID NO: 78221 - protein, 303 aa, Yersinia pestis
MSEVEKTYCGFIAIVGRPNVGKSTLLNELLGQKISITSRKPQTTRHRIMGIHTEGPYQAIYVDTPGLHIEEKRAINRLMNRAASSSLGDVELVIFVVEGTHWTADDEMVVNKLRSLQCPVLLAINKVDNVTDKTKLLPHMQFLSQQMNFLDVVPISAEKGMNVDTIASIVRKHMPEAEHHFPEDYITDRSQRFMASEIIREKLMRFLGEELPYSVTVEIEQFVPNERGGYNIHGLILVEREGQKKMVIGNKGSKIKVIGTEARQDMERMFEAKVHLELWVKVKSGWADDERALRSLGYTDDLK

SEQ ID NO: 78222 - protein, 299 aa, Yersinia pestis
MNQHDRAVISASTLYVVPTPIGNLGDITHRALEVLKGVDLIAAEDTRHTGLLLQHFAINARLFALHDHNEQQKADQLLAKLQEGQSIALVSDAGTPLINDPGYHLVRRCREAGIRVVPLPGACAAITALSAAGLASDRFCYEGFLPAKTKGRKDTLQALIEEPRTLIFYESTHRLLESLQDMVTVLGPQRYVVLARELTKTWESIHGAPVGELLAWVKEEETRRRGEMVLIVEGHKVQSDDALPADALRTLALLQKELPLKKAAALAAEIHGVKKNALYKYALEQQQGDVETEEDDIQQ

SEQ ID NO: 78223 - protein, 531 aa, Yersinia pestis
MLSTNNITMQFGSKPLFENISVKFGGGNRYGLIGANGCGKSTFMKILGGDLVPSGGNVFLDPNERLGKLRQDQFAFENNTVLDTVIMGHGELWEVKEERDRIYAMAEMSEEDGYKVADLEVAYGEMDGYSAEARAGELLLGVGIPVEQHYGLMSEIAPGWKLRVLLAQALFSDPEILLLDEPTNNLDIDTIRWLEQVLNERNSTMIIISHDRHFLNMVCTHMADLDYGELRVYPGNYDEYMTAATQARERLLSDNAKKKAQISELQSFVSRFSANASKSKQATSRARQIDKIQLDEVKASSRQNPFIRFDQDRKLFRNALEVEMLTKGFDNGPLFKNLTLRLEVGEKVAILGPNGIGKSTLLKTLLGEYESDAGTVKWSENSKIGYYAQDHASDFDIDLTVFDWMSQWKQEKDDEQAVRSVLGRLLFSQDDIKKKVSVLSGGEKGRMLFGKLMMQRPNILVMDEPTNHLDMESIESLNMALEMYEGTLIFVSHDREFVSSLATRVIEMTPNKLIDFTGNYEDYLSSQGIHS

SEQ ID NO: 78224 - protein, 241 aa, Yersinia pestis
MISVRRGFSQLWYWGKRGVIGIIALWMAGILIFAFLPVPFSMVMIERQLGAWLTGDFAYVAHSDWVPMDEISPYMALAVMAAEDQKFPDHWGFDVGAIESALSHNQRNQKRIRGASTLSQQTAKNVFLWDGRSWVRKGLEVGLTAGIELIWTKRRILTVYLNIAEFGNGIFGVEAAARHFFNKPASKLSASEAALLAAVLPNPLRFKVNAPSGYVISRQQWILRQMHQLGGKTFLQENTLD

SEQ ID NO: 78225 - protein, 424 aa, Yersinia pestis
MDHCNTSDLLSLEQALTKMLSQATPLPATEVIPLSEAAGRITASAITSPIAVPPFANSAMDGYAVRWHELSDEIPLPVAGVAFAGAPFKDVWPEKTCIRIMTGAPLPKGADAVVMQEHAVVSEQGVIFNSNIRIGQNIRLAGEDIQQGASVFPAGVKLGAAQLPLLASLGIAEIAVYRALKVAIFSTGDELQPIGHPLAEGQIYDTNRFAVRLMLQQLGCQIIDLGVIRDDQHALRAAFQQADTAADLVISSGGVSVGEADYTKQILDELGDIGFWKLAIKPGKPFAFGKLSNAWFCGLPGNPVSAALTFYQLVQPLLAKLSGHTEWHPPLRLKAKATTPLKKTPGRLDFQRGVFSSNADGQLEVRTTGHQGSHIFSSFSQGNCFIVLERERGSVAVGESVEIELFNELLGGNRPFAIHHPVGG

SEQ ID NO: 78226 - protein, 921 aa, Yersinia pestis
MSRTINLSSPAMPYLLGEPALVLSKLEGEEAFSTLYSYTITAKTPANPLIPWQAASNVDLKSLIGKEMTIEMELDGNGLGDVRSVGKGTREITGLVERARYIGRDANQAIFEITIKPWFYLANLTSDFKIYQNKNVVDIIEEVFSDYNFPFEKRLATTYPILDFQVQYGETDFNFLQRLMEEWGIYWFFEHQDHKQKLILVDHVGAHKRSFSTAYHAIEYLSDEPKAGEEYITQFQTQETLTSGTWVTNDYDFTKSRADILAMDSKPRKTSFNDLEIYHWPGDYDQPDIGEHLSRVRIEERGALGSRAVGSGQLRGIVCGANFELKGFPVDKANREYMIISSRLTVAEVDQLSGGEDAFSCESSFTVQPTTKIYRHPQVTPKPKTNGPQNAIIVGPPGEEIWTDEYGRVKVRFVWDRYGTNSESDSCWLRVSQAWAGNSFGGIYIPRIGQEVIVDCINGDPDRPMVMGSLYNNVTRPPWDLPANATQSGMVSRTVGGGLTNYNGVRFEDKSGLEQYWEQAERDMSRLTKNNETQIIGADSVLNVGANRSEVVGANYNQDVLGTSMLAIGAASMLQVGLARSVVVGGAHSLNVVLANATNVGGANMTNVGGFNGLAVGGAHQTAVGGAATLAAGGPIAIGAGGELILSGDIVKIVGKSKVIIQGGEVHINSDDCCGRKTGNGGGAFGAFASLAGLLPLAGAIALPLPLPLLPIVVPPVTSPPDPTVPPDPTLPPDPTLPPDPTLPPETTAPPETTAPPETTAPPETTAPPETTAPPETTAPPETTAPPETTAPPETTAPPETTAPPETTAPPETTAPPETTAPPETTAPPETTAPPETTAPPETTAPPETTAPPETTAPPETTAPPETTAPPETTAPPETTAPPETTAPPETTAPPETTAPPETTAPPEPTRTPPGTQTPPP

SEQ ID NO: 78227 - protein, 280 aa, Yersinia pestis
MNTSLELLEEHRMFGCWQQRYRHAASSLNCHMTFSIYLPPPRDDNPPPVLYWLSGLTCNDENFTLKAGAQRVAAELGLVLVMPDTSPRGDNVPNDDSYDLGQGAGFYLNATQEPWSDHFQMYDYISQELPSLIRQHFSVSERQSISGHSMGGHGALMLALRNPQQYQSVSAFAPIVNPCQVPWGRKAFTAYLGSDENQWLQYDSCHLLTHAQHQLPILVDQGDGDQFLADQLQPAKLAELARQRDWPLMLRIQPGYDHSYFTIATFIEDHLRFHAAHLQP

SEQ ID NO: 78228 - protein, 679 aa, Yersinia pestis
MARLSGKALYVIWILLLLVTGTVQATADEISVSTPAVEAPKGHGLIRAYEHILSFDTHARFDADGSMEMRENIKVLSLGKQISRGIFRTLPLTWNRQDGKFFSVEYQIKNVLRDGVAEPFSVTKEGETLMVRIGRADHILKPGIYNYVIQYQVSNHFSRFPDWDELYWNVTGNGWEYPISKASFHLELPASEAFLNSEGKDTRLSTIDVYTGRLGEKEQNAKILADGSVQTSQPLKQGEGLTVAYTWPRTILANAPAPETSSLLVYLLLPTVQTSVLWIPILLLIGYYLLWWRKNVTAIGLKMPPIVPLYALPATLSPGYLRYVTQRKYDAIAFSSDLLNLVAQRSVAIKTKKSKNKSPWVLNSRDEQWLSLQSDGNQLDIHDKQLLHTLFSSNRKNINLSKPHQRPMQKALKFLEKRCEDQQEKLFSQWLGPIWRGIFIMLLVPVICGLLFNTGIAFITIPVLLLLLLGINLLSLPLKFLFSPKQVLDSRGALSVCFALLFGLLALLPVGLFIFNLPPLTQLPAGYLGALLVAILLCVTFTRMVPRYTQRGLNHLAIARGLKLYLGTAERHRYQALYPPDKLVAHFESMLPVALALGVGKTWANSFAQYLVSTGTLSVVFANADWSSVNHFSQSCSSSATATPSRSSDSSSSSSSSGSGSSGGGSSGGGSGGGGGGGW

SEQ ID NO: 78229 - protein, 1538 aa, Yersinia pestis
MRTITRGHWRRAEKQICRKARVCQPTLSDINMSFTSWFVRVSQSLGRFTDMLYDQSQERDNCGFGLIAHIEGEPSHKVVRTAIHALARMQHRGAILADGKTGDGCGLLLQKPDHFFRMVAEERGWRLAKNYAVGMMFLSQDEELAKASRRIVEEELQNETLSIVGWREVPTNPDVLGEIALSSLPRIEQIFVNAPAGWRSRDMERRLFVARRRIEKRISDKDFYACSFSNLVTIYKGLCMPADLPRFYLDLADLRLESAICLFHQRFSTNTVPRWPLAQPFRYLAHNGEINTIAGNRQWAKARAYKFKTPLIPDLQDAAPFVNETGSDSSSLDNMLELFLSGGMDLIRAMRLLVPPAWQNNPDMDTDLRAFFDFNSMHMEPWDGPAGIVMSDGRYAACNLDRNGLRPARYVITKDKLITCASEVGIWDYQPDEVVEKGRVGPGELMVIDTRSGKILHSAETDNDLKSRHPYKEWMEKNVKRLVPFEDLPEEQVGSRQLDDSQLETYQKQFGYSNEELDQIIRVLGENGQEATGSMGDDTPFAVLSSGPRIIYDYFRQQFAQVTNPPIDPLREAHVMSLATSIGREMNVFCEAEGQAHRLSFKSPILLYSDFQQLTTLEGEHYRADRLDLTFNPAENDLEQAVLSLCDEAERKVRDGAVMLVLSDRAIAPNRLPVPAPMAVGAIQTRLVDKSLRCDANIIVETASARDPHHFAVLLGFGATAIYPYLAYESLAKLVDSQAIDKKYRDVMLNYRNGINKGLYKIMSKMGISTVASYRCAKLFEAVGLHRDLSDLCFQGVVSRIGGASFSDFQQDLQNLSKRAWLKRKPLDQGGLLKFVHNGEYHAYNPDVVSTLQKAVHSGEYSDYQAYAKLVNERPIATLRDLLAIKPQGTPIPVDQVEPAESLFKRFDTAAMSIGALSPEAHESLAIAMNSLGGFSNSGEGGEDPARYGTNKVSRIKQVASGRFGVTPAYLVNADVIQIKVAQGAKPGEGGQLPGDKVTPYIAKLRYSVPGVTLISPPPHHDIYSIEDLAQLIFDLKQVNPKAMISVKLVSEPGVGTIATGVAKAYADLITIAGYDGGTGASPLSSVKYAGCPWELGLVETQQALVANGLRHKIRLQVDGGLKTGVDIVKAAILGAESFGFGTGPMVALGCKYLRICHLNNCATGVATQDEKLRRDHYHGLPERVVNYFHFIARETRETREIMAELGVSQLVDLIGRTDMLLELDGISAKQNKLDLSPMLKTATPHPGKALYCTESNPPFDKGLLNKELLSQAEPYIEAKQSKTFYFDIRNTDRSVGAALSGAIATKHGDQGLATDPIKAYFSGTAGQSFGVWNAGGVELMLTGDANDYVGKGMAGGRIAVRPPVGSNFRSHEASIIGNTCLYGATGGKLFAAGRAGERFAVRNSGAITVVEGIGDNGCEYMTGGIVCVLGRTGINFGAGMTGGFAYVLDEDGEFRKRVNPELVEVLDVEQLAIHEEHLRGLITEHVQLTGSSRGEEILANWPEWVTKFALVKPKSSDVKALLGHRSRSAAELRVQAQ

SEQ ID NO: 78230 - protein, 213 aa, Yersinia pestis
MAVAANKRSVMTLFSGPTDIFSHQVRIVLAEKGVSVEIEQVEADNLPQDLIDLNPYRTVPTLVDRELTLYESRIIMEYLDERFPHPPLMPVYPVARGSSRLMMHRIEHDWYSLLYKIEQGNAQEAEAARKQLREELLSIAPVFNETPFFMSEEFSLVDCYLAPLLWRLPVLGIEFTGAGSKELKGYMTRVFERDAFLASLTEAEREMHLKTRS

SEQ ID NO: 78231 - protein, 219 aa, Yersinia pestis
MFISVLRRELKIAFRKGAEIVNPLWFFLIVITLFPLGIGPEPQLLARIAPGIVWVAALLASLLSLERLFRDDFYDGSLEQLLLLPTPLPLTVLGKVCAHWVVTGLPLLVLSPLVALLLSLDVNTAIAMGLTLLLGTPTLSFIGAIGVALTVGLRKGGVLLSLLVLPLYIPVLIFATAAIDAASMAMPIDGYLAILGAMLAGSVTLAPFATAAALRVSIQ

SEQ ID NO: 78232 - protein, 130 aa, Yersinia pestis
MAENQYYGTGRRKSSSARVFLKPGSGKIVINQRSLEVYFGRETARMVVNQPLELVDMVTKFDMYITVKGGGISGQAGAIRHGITRALMEYDESLRGELRKAGFVTRDAREVERKKVGLRKARRRPQFSKR

SEQ ID NO: 78233 - protein, 142 aa, Yersinia pestis
MKTFTAKPETVKRDWYVVDASGKTLGRLATELARRLRGKHKAEYTPHVDTGDYIIVLNAEKVAVTGNKRTDKIYYHHTGFVGGIKQATFEEMIARRPERVIEIAVKGMLPKGPLGRAMYRKLKVYAGTEHNHAAQQPQVLDI

SEQ ID NO: 78234 - protein, 506 aa, Yersinia pestis
MADINTAQPRDWLLEMSNIDKSFPGVKALDNVNLKVRPYSIHALMGENGAGKSTLLKCLFGIYKKDSGSIIFQGQEIEFKSSKEALEQGVSMVHQELNLVLQRTVMDNMWLGRYPTKGFFVDQDKMYKETKAIFDELDIDIDPRDKVATLSVSQMQMIEIAKAFSYNAKIVIMDEPTSSLTEKEVNHLFTIIRKLKARGCGIVYISHKMEEIFQLCDEITILRDGQWITTQPLDGLTMDQIISMMVGRSLSQRFPDRLNKPGEVILEVKNLTSLRQPSIRDVSFDLHKGEILGIAGLVGAKRTDIVETLFGIREKVTGTIKLHGKNINNHSANEAINHGFALVTEERRSTGIYAYLDISFNSLISNIRNYKNKFGLLDNTRMKSDTQWVIDAMRVKTPGHRTNIGSLSGGNQQKVIIGRWLLTQPEILMLDEPTRGIDVGAKFEIYQLMTELAKKDKGIIIISSEMPELLGITDRILVMSNGQVAGIVDTKQTTQNEILRLASLHL

SEQ ID NO: 78235 - protein, 265 aa, Yersinia pestis
MPGGMGGKGVDRKFIETLKTYCDDANRGGGPLYQRLEKGFRDLITRGELKAGYAIPSERELSERLNLSRVTVRRALSELANAQVIVQRRGARSTVAGRVEKPLSSLTSFSEDMISRGYEPGARWLQKELTHASPSEIIALNLSPGALVWRLKRLRTVDEHPMAVEIAVVPQMFIPEMDELRDSLYSVLQLHGFMPARALQRIRAEPLSRDHSQLLDMPAHSPALHVERHCYLEDGRPIEYTHTWYRGDSYDFLVELQRDITPGLS

SEQ ID NO: 78236 - protein, 134 aa, Yersinia pestis
MTWEYALIGLVVGVVIGAVAMRFGNRKLRQQQVLQNELEKSKTDLEEYRQELVGHFARSAELLDNMARDYRQLYQHMAKSSNNLLPDLPLQDNPFRYRLTESEADNDQAPVKLPPRDYSEGASGLLRPEHQNRD

SEQ ID NO: 78237 - protein, 337 aa, Yersinia pestis
MTDRVIKVGVIGAGFMGAMHARIWQQMYGVEVVGVADPDLSRSEALKPWIPQLNGYEDFNQMLEQEKPDIVSICTKDDFHLAPALAAAKVGAHIFLEKPIATTVEDGEAITRAAREANVKLGIGFLLRFDPRYSRAQEILASGSAGEVSHISARRNSPAIEGPARYGGSLPLPLHVTVHDVDMILWLLKHTHPISVYAQTTNKLLGHLGTEDSVFAIIRFADGTVVNLESSWALPAGSRTLLDAKMSILATKGLIEIECGESGLYHASENMNRYIDTQHWPLSQGELKGDLREELMAFLGDVRTGTTRVATGEEGNEALRITVAIMDSARTGEIVRV

SEQ ID NO: 78238 - protein, 457 aa, Yersinia pestis
MKKTSLLLSALAISVGLGLASVPMVSAAALPAAVAGQTLPSLAPMLEKVLPAVVSVHVSGSQAQQQRLPEEFKFFFGPNAPSGKESSRPFEGLGSGVIINAEKGYILTNNHVINNADKIRVQLNDGREYDAKLLGRDEQTDIALLQLTDAKNLTAIKIADSDNLRVGDFAVAVGNPFGLGQTATSGIISALGRSGLNLEGLENFIQTDASINRGNSGGALVNLDGELIGINTAILAPGGGNIGIGFAIPSNMAQNLSQQLIEFGEVKRGLLGIRGSEMTADIAKAFNIDAQRGAFVSEVLPKSAAAKAGIKPGDVLISVDGKKISSFAELRAKVGTTGPGKTIKIGLLREGKPLEVSVTLDNSSSTSTSAENLSPSLQGASLSNGELKDGSKGIKVDSVTKGSPAAQSGLQKDDVIIAVNRERVKDIAELRKAIEAKPAVIALNIVRGEDNIYLLIR

SEQ ID NO: 78239 - protein, 254 aa, Yersinia pestis
MNFRLTGLAFASVLLVGCASSSPDHMEQGRSDPLEGFNRAMFNFNYEVLDPYVVRPVAVVWRDYVPQPARNGMSNFLGNLEEPASMVNSFLVGDPYNAMKHFNRFFLNTVLGMGGLIDVAGMANPKLAKQVPQRFGSTLGHYDVGYGPYVVLPGYGSFTLREDGGQLADTVYPVLSYLTFWMAAGKWVLEGVETRAQLLDSDGLVRNSSDPYLMIREAYFQRHDFLANGGQLKPEVNSNAQAIQGDLDSIDAAD

SEQ ID NO: 78240 - protein, 423 aa, Yersinia pestis
MVMNQKNLFTRSALAAAIALISSNVSAAGFQLNEYSAAALGRAFSGEGAVADNASVGSRNPAAMTLFDRPSFSGGVIYIDPSVDITGTSPSGKSTDASNIAPSAWVPNLHFIMPLDEQWAIGASATSNYGLATEFNDDYVAGMLGGQTDLKTANLNLSAAYRLNDNFSFGLGFDAVYADAKIVRHLGEAGGGLLPANTEAARLEGTKWGYGWNTGILYEIDKENRYSFTYRSEVNIDFDGDYSNQLPVIFGGLGGKTVPGSLTLNLPAVWEVSGYNKVAPQWAIHYSMAYTTWSSFKELKATASNGDVLFDKHEGFRDAYRIALGTTYYYDDNWTFRTGIAFDDSPIPAGNRSISIPDQDRFWLSAGTTYAFNKNASVDVGIAYMKGQNVSITEKTPAPSNTTYEFNSKGSAMLYGVNFNYTF

SEQ ID NO: 78241 - protein, 420 aa, Yersinia pestis
MDKFRVQGRTRLSGEVTISGAKNAALPILFAALLAEEPVELQNVPKLKDIDTTIKLLSQLGTKIERNNGSVFVDASAVNEFCAPYDLVKTMRASIWALGPLVARFGQGQVSLPGGCAIGARPVDLHITGLEQLGAEIKLEEGYVKASVNGRLKGAHIVMDKVSVGATVTIMSAATLAEGTTVIENAAREPEIVDTANFLNTLGAKISGAGTDRITIEGVTRLGGGVYRVLPDRIETGTFLVAAAISGGKVVCRQTRPDTLDAVLAKLREAGADIEVGDDWISLDMQGKRPKAITFRTAPHPGFPTDMQAQFSLLNLVAEGTGVITETIFENRFMHVPELIRMGAHAEIESNTVICYGVEQLSGAQVMATDLRASASLVLAGCIAEGVTIVDRIYHIDRGYERIEDKLRALGAKIERVKGE

SEQ ID NO: 78242 - protein, 98 aa, Yersinia pestis
MSDAINRCSAEETAACCCVDVGTVMDNTDRTASYSCVFASRHEAEAMLKTLTDKARAVESDPCLIEHKLEDVEGGVRLTIDFTFACQAETMIFQLGLR

SEQ ID NO: 78243 - protein, 436 aa, Yersinia pestis
MSKPLPLVTRQGDRIVIVNGLRTPFAKQATAYHGVPAVDLGKIVVSELLARSGISSELIDQLVFGQVVQMPEAPNIAREIVLGTGMSVHTDAYSVSRACATSFQAVANVAESIIAGSVDIAIAGGADSSSVLPIGVSKALARTLVDANKARSLSQKLKLFSRLRLRDLLPVAPAVAEYSTGLRMGDTAEQMAKTYGISREDQDALALRSHQLAAEAWQQGWLHDEVMTAYIPPYREAIIEDNNIRKDSTLAQYAKLRPAFDRQHGSVTAANSTPLTDGAAAVLMMSESKAKALGLPPLGYLRSFAFSAIDVWQDMLLGPSYATPLALDRAGITLADLTLIDMHEAFAAQTLANLKMFASDTFAREKLGRSQAIGEVDMSKFNVLGGSIAYGHPFAATGARMITQTLNELRRRGGGLGLTTACAAGGLGAAMILEVE

SEQ ID NO: 78244 - protein, 774 aa, Yersinia pestis
MSKENIVTRENTAVSENAVSEPTVNNDVGASATNSVTHPAFTLNVRPDNIGIITIDVVGDKVNTLKAEFADQIATILQQAHALPKLQGLVIVSGKPDSFIAGADITMIAACRTAHDARVLAQKGQSILAQIAAFPVPVVAAIHGACLGGGLELALACHSRICSLDDKTVLGLPEVQLGLLPGSGGTQRLPRLVGVSKALDMILTGKQIRPRQALKMGLVDDVVPRDILLDVAIQRAKAGWLNRRALPWQERLLSGPLGKALLFRIVRKKTLAKTRGHYPAAERIIDVVRKGLDQGGPSGYEAEARAFGELAMSPQSAALRSLFFATTSLKKETGSAATARAIHRVGVLGGGLMGGGIANVTATRAGLPVRIKDINPQGINQALKYTWDALGKRVRSKRMRPTEQQRQMMLISGSTDYRGFERVDIVVEAVFEDLSLKQQMVADIERFGAAHTIFASNTSSLPISQIAALAQRPEQVIGLHYFSPVDKMPLVEVIPHEKTSEETIATTVALARKQGKTAIVVADRAGFYVNRILAPYINEAARCLLDGEPIESVDNALVDFGFPVGPMMLLDEVGIDVATKIMPILVEQLGPRFAAPPSFDVILKDGRKGRKNGRGFYLYSNPTKNSSPTKNGNSPAKRNSFKWRKNKVKPVDASIYTLLGVTPKAHLGAGVITQRCTMLMLNEAVRCLDESIIRNPRDGDIGAVFGIGFPPFLGGPFRYLDSLGADKVVQALRLLVQQYGERFEPCQRLVTMAEQQQQFYPVDANIDEVTDVAS

SEQ ID NO: 78245 - protein, 393 aa, Yersinia pestis
MQRFSSRVTNLLIASLVLTIGRAVTLPFITIYLVEHFQLAPDTVGLLLGASLALGIFTSLYGGYLVDKFNKKRLILLTIILFSATFFALPWIEHPAWVILTLALLHSAYSVYTIAVKACFADWLPVNERIKAFSANYTLVNVGWAIGPVMGVLVVGFGPQLPFIISGALALLVAIVLKFRINDADMLATERVSSESVPDLRQTFNILRHDKRLIYFTLGSLLGAMVFAQFSGYLSQYLITVFDAKFAYQVIGAVMTVNATIVIALQYLLSRRMNQQNLMRWLMIGTLFFIIGLLGFMVAQDSIPLWMLAMAIFSLGEIIVIPAEYLFIDFIAPANLKGSYYGVQNLGQLGGAINPVLCGFLLAYTVPEMMFYMLIIAATLGLVLFYRGYHLAK

SEQ ID NO: 78246 - protein, 675 aa, Yersinia pestis
MAQVAKKILVTCALPYANGSIHLGHMLEHIQADIWVRFQRMRGNQVHFICADDAHGTPIMLKAQQMGIEPEQMIAEMSQEHQQDFAGFAISYDNYHSTHSDENRELSSLIYGRLKANGYIKNRTISQLYDPEKGMFLPDRFVKGTCPKCKAPEQYGDNCEVCGATYSPTELIDPKSAVSGATPVMRESEHFFFDLPAFSDMLQAWTRSGALQEQVANKMQEWFDSGLQQWDITRDAPYFGFEVPDAPGKYFYVWLDAPIGYMGAFKNLCDKRGDLDFDEFWGKDAKTDLYHFIGKDIVYFHSLFWPAMLEGSNFRKPTNLFVHGYVTVNGAKMSKSRGTFIKAGTYLKYLDADCLRYYYAAKLSSRIDDIDLNLEDFVQRVNADIVNKVVNLASRNAGFINKRFAGQLADQLADPVLYKTFTDAATSIADAYNNRESGKAIREIMALADVANRYVDEQAPWVVAKQEGRDADLHAICSMGINLFRVLMTYLKPVLPSLTERTEAFLNTELTWDSIEQPLLGHSITAFKALFNRIDLDKVNEMVASSKEDMAPATRVTGPLADDPIQETISFDDFAKVDMRIALIQQAEFVEGSDKLLKLTLELGGETRQVFSGIRSAYPDPKALEGRMTVMVANLAPRKMRFGVSEGMVMAAGPGGSDIFLLSPDSGAQPGMQVK

SEQ ID NO: 78247 - protein, 361 aa, Yersinia pestis
MAGNSIGQFFRVTTFGESHGIALGCIIDGVPPGIPITEADIQLDLDRRRPGTSRYTTQRRELDQVRILSGVFEGVTTGTSIGLMIENTDQRSQDYSAIKDVFRPGHADYTYEQKYGVRDYRGGGRSSARETAMRVAAGAIAKKYLAQKFGVQVRGYLAQMGDVSCDLLDWDLVEQNPFFCPDASKLEPLDALMRELKKAGDSIGAKITVVAENVPVGLGEPVFDRLDADLAHALMSINAVKGVEIGDGFAVVTKRGSENRDEITPQGFQSNHAGGILGGISSGQPVVAHIALKPTSSIMVPGQTINRQGEAVEMVTRGRHDPCVGIRAVPIAEAMMAIVLMDHLLRQRAQCGDVASDVPRW

SEQ ID NO: 78248 - protein, 618 aa, Yersinia pestis
MRRLLTMLVILLIVLVAGMSALVLLVNPNDFRAYMVKQVEKKSGYHLQLEGDLRWHVWPQLSIIAGRMALTAPGALEPVVSAENMRLDVKLWPLLSHQLDVKQVMLKGAVIRLTPDSEAQQQIDAPVAPIAPAGSTPVSDNRGWTLDINRLQIADSLLIWQRSDNDQINVRDINLELKQGGQRQVQVTLASRVNRNQRDLTFSMVIDADMHQYPRQFSANISQFTYKLEGADIPAGGISGGGALEASYQSDIQQLLLNQLNFTANNNQLAGSVKATFGDVPDYVVNLTSDNLNLDAIFGWQPKSSTASTDEAKQPVTTAPVIAIQIDDDVGQNLQALRDFTAQTTVVANNVVYRNININQLNLQATNQQGDLQVTRLTGNALEGDFSLAGALDVTGKKVLATVNPLINHMELGPVLQAAGLPQVMTGKFSMQAQLSGDGVNLAAFKHRWRGEAQVSMNNARLQGLNIQQLIQQAVTRSTNDVKGQERYERYTEVKQLQASLALNRGAVKVSGLNASSSLISVKGSGGLNLPTQQCDMNLAVRVMQGWNGQSSLVKTLQNTDIPLRIYGPWTQLNYQLNVDQLLRSELQQRAKKALGEWAERNQQNRRVDDLKKSLDKL

SEQ ID NO: 78249 - protein, 525 aa, Yersinia pestis
MNSSFESLIEQYPLPIAEQLRHWAARYASRIAVVDAKGSLTYSALDAQVDELAAGLSSLGLRSGEHVIVQLPNDNAFVTLLFALLRLGVIPVLAMPSQRALDIDALIELAQPVAYVIHGENHAELARQMAHKHACLRHVLVAGETVSDDFTPLFSLHGERQAWPQPDVSATALLLLSGGTTGTPKLIPRRHADYSYNFSASAELCGISQQSVYLAVLPVAHNFPLACPGILGTLACGGKVVLTDSASCDEVMPLIAQERVTHVALVPALAQLWVQAREWEDSDLSSLRVIQAGGARLDPTLAEQVIATFDCTLQQVFGMAEGLLCFTRLDDPHATILHSQGRPLSPLDEIRIVDQDENDVAPGETGQLLTRGPYTISGYYRAPAHNAQAFTAQGFYRTGDNVRLDEVGNLHVEGRIKEQINRAGEKIAAAEVESALLRLAEVQDCAVVAAPDTLLGERICAFIIAQQVPTDYQQLRQQLTRMGLSAWKIPDQIEFLDHWPLTAVGKIDKKRLTALAVDRYRHSAQ

SEQ ID NO: 78250 - protein, 284 aa, Yersinia pestis
MVLMIVSGRSGSGKSVALRALEDMGFYCVDNLPVVLLPQLASTLADRNISAAVSIDVRNMPESPEVFEHAMTQLPDSFSPQLLFLDADRNTLIRRYSDTRRLHPLSAKNLSLESAIDEESDLLEPLRSRADLIIDTSEMSVHELAEMLRTRLLGKRERELTMVFESFGFKHGIPIDADYVFDVRFLPNPHWDPKLRPMTGLDKPVISFLDRHTEVHNFIYQTRSYLEQWLPMLETNNRSYLTVAIGCTGGKHRSVYVAEQLADYFRARGKNVQSRHRTLEKRKQ

SEQ ID NO: 78251 - protein, 305 aa, Yersinia pestis
MNVLFPLFAVIIWSVNAVVSKISATAIDPAAISFYRWLLALLTLSPFLLLGVVRNWQAIRVYWWKLMLLGMLGMVLYQSLAYYAAHSVSALFMGILSSLIPLLTVLISIVLLRVAPTVGIALGSLLSLGGLVWLISAGNPVQLLQHGIGKGELMMLGASASYALYGVLTKRWAIQLPNWQSLYMQIVFGVVLLLPGFLMTPDVQLTAQNIPLVLFAGIPASILAPYLWIQGVMRLGANTASIFMNLTPVFTAIIAVVFLHEQLHSYHLIGGGITLAGVVLAQRLRSPLRRNLDLAGHIPNNKNSR

SEQ ID NO: 78252 - protein, 375 aa, Yersinia pestis
MKILVDENMPYAEELFRRLGDVQAVPGRPIPRDALVDADALMVRSVTKVNEALLHGTSIGFVGTATAGTDHVDDTWLRQQGIGFSAAPGCNAIAVVEYVFSALMMMAERDGFQLRDKTVGIIGVGNVGSRLNARLQALGVRTLLCDPPRADRGDNEAFWPLEKLVREADVLTFHTPLNKTGAYQSLHMADDELLAALPDGRILINACRGAVVDNAALLRALEKGKKLSVVLDVWEPEPDLSLPLLARVDIGTPHIAGYTLEGKARGTTQVFEAFSQHLGQPQSVELASLLPVPEFSHLRLNGELDEGKLKRLMHLVYDVRRDDAPLRHVAGLPGEFDRLRKHYQERREWSSLCVQCDDATSAGLLQQLGFTTQLL

SEQ ID NO: 78253 - protein, 336 aa, Yersinia pestis
MSDGWNIALLGATGAVGEALLELLNERQFPVGELYPLASERSAGATVRFNGKSILVENVAEFDWSQAQLAFFVAGREASAQYAEEAGNAGCLVIDSSGLFAMEPDIPLVVPSVNPQVLADYRNRNIVAVADSLTSQLLTAIKPLTEQAGLSRLHVTNLISASAHGKAAVDDLAGQSAKLLNGIPAEPGIFPKQLAFNVLPLLADEEGSVSEERRLVDQVRKVLQDEGLPITVSCIQSPVFYGHAQVVHLEALRPIAAEEARSELENCDDIQLSEEDDYPTQVSDASGSDALSIGCVRNDYGIPEVLQFWSVADNIRFGGALMAIQTAERLLQEQLY

SEQ ID NO: 78254 - protein, 565 aa, Yersinia pestis
MGISQTELIFSLLQQMCVYLVIAYLLSKTPLFIPLMQVTIRLPHKLVCYLTFSMFCIMGTYFGLNIDDSIANTRAIGAVLGGMLGGPSVGFLVGLTGGLHRYSMGGMTATACMLSTIAEGLLGGLLHLYLTRKNRLDLLFQPLVVAGITLVAEVLQMMIILAVARPFNEAVELVENIALPMMITNTIGAAMFMRILLDRRAIFEKYTTAFSAKALQIAARAEGLLRHGFDQQNSMRVARILYEELGVGAVAITDREKLLAFIGSGADHHQVGSAITSSHTHRAIELNQVVYADGNAVPYTCSISPTCKLGSTLVIPLRGEEHRVIGSIKLYEPKSKLFSSINRTLGEGIAHLLSAQILAGEFEQQKQLLAQSEIKLLHAQVNPHFLFNALNTLSVVIRRNPDHARNLVLSLSTFFRKNLKRSHDVVTLSDEIEHVNAYLEIEKARFADRLTVTVSLPNELMEAHLPAFSLQPVVENAIKHGISQMFSNGRVTLRGKLDDNTLVLEVEDNAGLYQPQPDGDGLGMSLVDRRIKARYGKEYGITVVSNAEVFTRIIIKLPFITVSEQ

SEQ ID NO: 78255 - protein, 68 aa, Yersinia pestis
MKHPFSTRLAAVQHYLSGKATLRETARQFSVGKSPLTRWIRAFRRQGEAGLEHHLSRTYTPEFRLCVV

SEQ ID NO: 78256 - protein, 304 aa, Yersinia pestis
MSWIERILNKSNITQTRKASIPEGVWTKCDSCGQVLYRAELERNLEVCPKCDHHMRMSARARLHMLLDAGSEVELGSELEPKDILKFRDSKKYKDRISAAQKDTGEKDALVAMKGTLQGMPIVAASFEFAFMGGSMASVVGARFVRAVEQALEDNCPLVCFSSSGGARMQEALMSLMQMAKTSAALAKMQERGLPYISVLTDPTMGGVSASLAMLGDINIAEPKALIGFAGPRVIEQTVREKLPPGFQRSEFLIEKGAIDMIVRRPVMRQTLASILSKLTHQPQPSVVESKADTVAQPENQADV

SEQ ID NO: 78257 - protein, 3013 aa, Yersinia pestis
MLNYFRAILISWKWKLSHHTSRPHDVKEKGHPRKIKVVAWITLFFQFAFPLSLSFTPAIAAANTTNSAPTSVITPVNASILPPAARATEPYTLGPGDSIQSIAKKYNITVDELKKLNAYRTFSKPFASLTTGDEIEVPRKESSFFSNNPNENNKKDVDDLLARNAMGAGKLLSNDNTSDAASNMARSAVTNEINASSQQWLNQFGTARVQLNVDSDFKLDNSALDLLVPLKDSESSLLFTQLGVRNKDSRNTVNIGAGIRQYQGDWMYGANTFFDNDLTGKNRRVGVGAEVATDYLKFSANTYFGLTGWHQSRDFSSYDERPADGFDIRTEAYLPAYPQLGGKLMYEKYRGDEVALFGKDDRQKDPHAVTLGVNYTPVPLVTIGAEHREGKGNNNNTSVNVQLNYRMGQPWNDQIDQSAVAANRTLAGSRYDLVERNNNIVLDYKKQELIHLVLPDRISGSGGGAITLTAQVRAKYGFSRIEWDATPLENAGGSTSPLTQSSLSVTLPFYQHILRTSNTHTISAVAYDAQGNASNRAVTSIEVTRPETMVISHLATTIDNATANGIATNTVQATVTDGDGQPIIGQLINFAVNTQATLSTTEARTGANGTASTTLTHTVSGVSRVSVTLGSSSRSVDTTFVADESTAEITAANLTVTTNDSVANGSDTNVVRAKVTDAYTNAVANQSVIFSASNGATVIDQTVITNAEGIADSTLTNTTAGVSVVTATLGGQSQQVDTTFKPGSTAAISLVKLADRAVADGIDQNEIQVVLRDGTGNAVPNVPMSIQADNGAIVVASTPNTGVDGTINATFTNLRAGESVVSVTSPALVGMTMTMTFSADPRTAVVSTLAAIDNNAKADGTDTNVVRAWVVDANGNSVPGVSVTFDAGNGAVLAQNPVVTDRNGYAENTLTNLAIGTTTVKATTVTDPVGQTVNTHFVAGAVDTITLTVPVNGAVANGVNTNSVQAVVSDSGGNPVTGATVVFSSTNATAQVTTVIGTTGVDGIATATLTNTVAGTSNVVATIDTVNANIDTAFVAGAVATITLTAPVNGAVADGADTNQVDALVEDANGNPITGAAVVFSSANGATILSSTMNTGVNGVASTLLTHTVAGTSNVVATVDTVNANIDTTFVAGAVATITLTTPVNGAVADGANSNSVQAVVSDSDGNPVTGAAVVFSSANATAQITTVIGTTGADGIATATLTNTVAGTSNVVATIDTVNANIDTAFVAGAVATITLTAPVNGAVADGADTNQVDALVQDANGNAITGAAVVFSSANGADIIAPTMNTGVNGVASTLLTHTVAGTSNVVATIDTISANIDTAFVAGAVATITLTAPVNGAVADGADTNQVDALVEDANGNPITGAAVVFSSANGATILSSTMNTGVNGVASTFLTHTVAGTSNVVATIGSVTENIDTAFVAGAVATITLTAPVNGAVADGVNTNSVQAVVSDSDGNAVTGATVVFSSANATAQITTVIGTTGADGIATATLTNTVAGTSNVVATIDTVNANIDTTFVAGELENIVVSIINNNALANGADTNIVEAFVTDRFGNGVANQSLIFGTNGASIVGSSTVTTNLDGRVRASATHTVAGSSNTVIAISGAHQGYARVTFVADVSTAQLKLTSFLDNQLANGKAGNIAQALVTDAHDNLLANQSVSFALDNGAVIESQGDASSASGIVLMRFNNTLAGMTTVTATLDSTGQTETLETHFVAGKAASIEMTMTKDNAVANNIDTNEVQVLVTDVDGNAINGAVVNLTSNSGMNITPNSVTTGSDGTATATLTHTLAGSLPINARIDQVSKTINATFIADASTAQIIAGDMFIIVNDQVANGQAVNAVQARVTDSYGNPIKDQTVEFVLSNNGTIQYELDVTSVEGGVMVTFTNTLAGITNVTATVVSSGSSRNIDTTFIADVTTAHIAASDLMVIVDDAVADNLDKNEVHARVTDAKGNVLSGQTVIFTSGNGAAITTVNGISDGDGLTKATLTHTLAGTSVVTARVGNRVQSKDTTFIADRTTATIRASDLTITRNNALADGVATNAARVIVTDANGNPVPSMFVGYTSDNGALLTPTSGMTDSSGTFSTTFTHTTAGISKVTAAIVTMGISQTKDAVFIADRSTAHVSELIVVKNDSLANNSDRNIVQAHIKDAHGNVVTGMNVNFSATENVTLTANTVTTNSQGYAENTLRHNAPVTSAVTATVATDLVGLTEDVRFVAGAGARIELFRLNDGAVADGIQTNRVEARVYDVSDNLVPNSNVVFSADNGGQLVQNDVQTDALGSAYVTVSNINTGVTKVTVTADGVSASTTTTFIADRDTATLVTDRFLITHDNAVANGVVENRVLLHLVDANDNSVSGVEVNFSATNGASINASAITDINGFAIGVLTNTLSGPSDVTVTLVTPGGTESLTVTPQFIADINTANIATGDFVIIDDGAVANSVDANEVRARVTDNQGNAIAGYSVVFSSQNGATITTSGITGVDGWASAKLTHIKAGESGILARLSRPMATVHTLMPYFIADVSTATLQLFNFNPIPIIADGVMQFFVLGRVFDANQNPVGGQQVAFSATNEVTLTESNGSISTPEGSVLLSVTSTQAGVHPITGTLVSNNYTDTFGAAFIANKNTAQLSTLMVVDNNALADGVTRNQVRAHVVDSTGNSVADMAVTFTANRGAQLSKVTVLTDNNGDAVNTLTNSLVGVTVVTAKLGTAGTPLTVDTVFTAGPLATLTLVTTVNNAFADNSATNTVQATLKDVSGNPIVGEVVAFAASNGATITATDGGVSNANGIVLATLTNGTAGVSTVTATIETLTETTDTTFIAMKNLDVTVNGTTFNGDAGFPTTGFVGATFKVNSGGDNSLYDWSSSAPALVSVSGDGVVTFNAVFPTGTPTITISATPKGGGSPLSYSFRVNQWFINNNGATLNRADAITHCENVGYTMPTSTQVTNAATWMSGKRAVGNLWSEWGDFSAYTAPGWVPAEFFWLSNNHDASTALAIGLSTGTLTTMGDFMAITHVMCTRPI

SEQ ID NO: 78258 - protein, 194 aa, Yersinia pestis
MIAATVLLFLIMDPLGNLPIFMSVLKHLEPKRRRVVLIRELLIALILMLIFLFAGEKILLFLNLRTETVSISGGIILFLIAIRMIFPSSESNVTGLSAGEEPFLVPLAIPLVAGPSILATLMLLSHQYPNQLSHLVLALMIAWGLSAAILLMSNLFLRLLGSKGVSALERLMGLILVMLSTQMFLDGVRAYLAI

SEQ ID NO: 78259 - protein, 438 aa, Yersinia pestis
MPLIIVAVGVAMLLLLMIRYKLNGFISLILVALAVGIMQGMPIDKVVGSIKAGVGGTLGSLALIMGFGAMLGKLLADCGGAQRIATTLIEKFGQKHIQWAVVLTGFTVGFALFYEVGFVLLLPLVFSIAASARIPLLYVGVPMAAALSVTHGFLPPHPGPTAIATIFNADMGKTLLYGTLLAIPTVILAGPVYARFLKGIDKPVPEGLYNPKIFTDKEMPSFGVSVSTALVPVILMALRAVAEMILPKGHSLLPYAEFFGDPVIATLIAVLIAIFTFGLNRGRSVESVMETLSDSIKIIAMMLLVIGGGGAFKQVLVDSGIEQYIAGMMGNSGASPILMAWSIAALLRIALGSATVAAITAGGIVAPLIATTGASPELMVIAVGSGSVIFSHVNDPGFWLFKEYFNLTIMETIKSWSVLETIISVCGLIGCLLLSLVI

SEQ ID NO: 78260 - protein, 262 aa, Yersinia pestis
MFMNKKLRVLPLVFAFAAASSAFAAIPKEIKIGTDPTYAPFESKNSSGELVGFDIDIAKELCKRIDTKCTFVESDFDALIPSLKAKKVDAIISSLSITEKRQKEIAFTDKLFAANSRLIAAKGSTIEPTLVALKGKRVGVLQGSTQEAFANAEWQPKGIDVVAYQNQDLIYADLASGRIDAAFQDEVAASEGFLKQPVGKDYIFAGPSVKNDQFFGVGTGMGLRKADVELKEALNKAFAEMRNDGTYDQFAKKYFDFDVYGD

SEQ ID NO: 78261 - protein, 228 aa, Yersinia pestis
MLDGYSKLIFEGALVTLELALFSVLLSVVIGLMGAGGKLSSNRLVSGLFECYTTLIRGVPDLVLMLLIFYGLQITLNSITESLGFVQIDIDPLSAGVITLGFIYGAYFTETFRGAYMAVSKGQIEAATAFGFTSSQIFRRIMFPAMMRYALPGIGNNWQVILKATALVSILGLNDVVKATQLAGKGTYQPFFFALVAGAIYLFFTTLSNGVLWWLERRYSHGVKRAEL

SEQ ID NO: 78262 - protein, 232 aa, Yersinia pestis
MGQKVHPNGIRLGIVKAWNSTWYANTKEFADNLDSDFKVRQFLTKELAKASVSRIVIERPAKSIRVTIHTARPGIVIGKKGEDVEKLRKVVADIAGVPAQINIAEVRKPELDAKLVADSITSQLERRVMFRRAMKRAVQNAMRLGAKGIKVEVSGRLGGAEIARTEWYREGRVPLHTLRADIDYNTSEAHTTYGVIGVKVWIFKGEILGGMAAVEQPEPAAQPKKQQRKGRK

SEQ ID NO: 78263 - protein, 302 aa, Yersinia pestis
MRILITGATGLIGRSLTPFLLSQGHQITALTRSLQRANNLLGQQVTYWPTLDDQEDLNSFDAVINLAGEPIAEKRWTSQQKEILCQSRWQITERLATLINASSQPPTVFISGSAVGFYGDQGQALVTEEEPPHDEFTHQLCERWENLALAAESSHTRVCLLRTGVVLAPEGGALAKMLPLFRLGLGGPMGDGRQYLPWIHLEDMVQGIYYLLTTHNLRGPFNMVAPYPVHNEQFTATLADVLDRPAAIRTPAAAIRLLMGESAILVLGGQRALPKRLEEAGFGFRYYELEDALRDVLKKPKE

SEQ ID NO: 78264 - protein, 136 aa, Yersinia pestis
MLQPKRTKFRKMHKGRNRGLAQGTDVSFGEFGLKACGRCRLTARQIEAARRAMTRAIKRQGKVWIRVFPDKPITEKPLEVRMGKGKGNVEYWVALIQPGKVLFEMAGVPEETAREAFKLAAAKLPVGTTFVTKTVM

SEQ ID NO: 78265 - protein, 176 aa, Yersinia pestis
MKKTLVTLMLFILPGIAFAETSNNTIKFQGEVAEQTCMVDINGTANTPVVLLPTVSTSNLNQVNSVAGKTNFTINLTGCNIAIQDTQISSVFQGMNVTSGGNLGNIGTARNVAIQLIDPRGTPIRMSGGSVEVPGITLATGATSASQDLSAQYITEEGQATAGSVIASAQYAITYP

SEQ ID NO: 78266 - protein, 84 aa, Yersinia pestis
MTDQIRTLQGRVVSDKMEKSMVVAIERVVKHPIYGKFIRRTTKLHVHDENNECGIGDVVEIRECRPLSKTKSWTLVRVVEKAIL

SEQ ID NO: 78267 - protein, 123 aa, Yersinia pestis
MIQEQTMLNVADNSGARRVMCIKVLGGSHRRYAGIGDIIKITIKEAIPRGKVKKGDVLKAVVVRTKKGVRRPDGSVIRFDGNACVILNNNSEQPIGTRIFGPVTRELRNEKFMKIISLAPEVL

SEQ ID NO: 78268 - protein, 104 aa, Yersinia pestis
MAAKIRRDDEVIVLTGKDKGKRGKVKNVLSSGKVIVEGINLVKKHQKPVPALNQPGGIVEKEAAIQVSNLALFNATTGKADRVGFRFEDGKKVRFFKSTSETIK

SEQ ID NO: 78269 - protein, 179 aa, Yersinia pestis
MAKLHDYYKDEVVKQLMSQFGYDSVMQVPRVEKITLNMGVGEAIADKKLLDNAAADLAAISGQKPFITKARKSVAGFKIRQGYPIGCKVTLRGERMWEFFERLITIAVPRIRDFRGLSAKSFDGRGNYSMGVREQIIFPEIDYDKVDRVRGLDITITTTAKSDDEGRALLAAFKFPFRK

SEQ ID NO: 78270 - protein, 101 aa, Yersinia pestis
MAKQSMKAREVVRVKLANKYRAKREELKAIISGVNSSDEDRWDAVLKLQSLPRDSSPSRQRNRCNQTGRPHGFLRKFGLSRIKVRETAMRGEIPGLKKASW

SEQ ID NO: 78271 - protein, 130 aa, Yersinia pestis
MSMQDPIADMLTRIRNGQAANKVAVTMPSSKLKVAIANVLKEEGFIEDFKIEGDTKPVLELALKYFQGKAVVESIQRISRPGLRIYKKKDELPKVMAGLGIAVISTSKGVMTDRAARQAGLGGEIICYVA

SEQ ID NO: 78272 - protein, 177 aa, Yersinia pestis
MSRVAKAPVVIPAGVEVKLNGQVISIKGKNGELTRTVHSAVEVKQEENTLTFAPREGAVDGWAQAGTTRALLNSMVIGVTEGFTKKLQLVGVGYRAAVKGNVVNLALGFSHPVDHELPAGITAECPTQTEIVLKGADKQVIGQVAADLRAYRRPEPYKGKGVRYADEVVRTKEAKKK

SEQ ID NO: 78273 - protein, 117 aa, Yersinia pestis
MDKKAARIRRATRARRKLKELGATRLVVHRTPRHIYAQVIAPNGSEILVAASTVEKAINEQLKYAGNKDAAAAVGKTIAERALEKGITKVSFDRSGFQYHGRVQALADAAREAGLQF

SEQ ID NO: 78274 - protein, 418 aa, Yersinia pestis
MDFFRFLMSDVLSEPAILVGLIALIGLIAQKKPVTECIKGTVKTIMGFVILGAGAGLVVSSLGDFANIFQQAFGIQGVVPNNEAIVSVAQKSFGKEMAMIMFFAMVINILIARFTPWKFIFLTGHHTLFMSMMVAVILATAGLSGMMLIAIGSVVVGVAMVFFPAIAHPYMKKVTGSDDVAIGHFSTLSYVLAGFIGSKFGNKEHSTEDMNVPKSLLFLRDTPVAISFTMCIIFVVTCLFAGPEVVKSLSGGKNWFMFSLMQSITFAAGVYIILQGVRMVIAEIVPAFKGISDKLVPNAKPALDCPVVFPYAPNAVLVGFLSSFAAGLIGMFALYLLNMTVIIPGVVPHFFVGAAAGVFGNATGGRRGAILGAFAQGLLITFLPVFLLPVLGDIGFANTTFSDADFGALGILLGIIVR

SEQ ID NO: 78275 - protein, 280 aa, Yersinia pestis
MSNLDTYQTRSWLFTPATRSDRFAKAAENGADVAIIDLEDSVSQADKEQARQKAISYLSSRPATSLPLALRINGLDTRAGIEDIHALLECGSLPDYLVLPKTESAAHLQILDRLMMFAGSDTRLIGIIESVRGLNAVESIAAATPKLAGLIFGAADMAADIGAASTWEPLALARARLVSACAMNGIPAIDAPFFDVHDVSGLQSETLRASDFGFSAKAAIHPAQISTINTLFTPTAAEIRHARAVLAENTKGVGTVNGMMIDEAVARQARRVLTRAGISA

SEQ ID NO: 78276 - protein, 398 aa, Yersinia pestis
MEQFDVVVIGAGAAGLFCAAQAGQAGCRVLLVDNGKKAGRKILMSGGGRCNFTNIYTEPAAYLSQNPHFCKSALARYTQWDFIDLMNRHNIAWHEKTLGQLFCDDSAQQVVDLLLKECELGNVTVRLRSNVLSVEKSDTGFVLHINDLRVSANSLVVASGGLSMPGLGASPFGYKLAEQFGLKVLPTRAALVPFTLHKPLLDHVQTLSGVSVPAVVTAENGVSFRESILFTHRGLSGPAILQLSSYWQAGEYVSINLLPDVDLAAFLNTERQAHPNQTLKNTLAQLLPKRLVECLQTLEQLPDVTLKQLNVPQQAALIANLQQWRVQPNGTEGYRTAEVTLGGVDTQELSSKTMEAHKVPGLYFIGEVVDVTGWLGGYNFQWAWSSAWACAQGLAAKK

SEQ ID NO: 78277 - protein, 498 aa, Yersinia pestis
MLHLFAGLDFHTGLMLVLALLFVLFYEAINGFHDTANAVATVIYTRAMRSQIAVVMAGVFNFLGVMLGGLSVAYAIVHLLPTDLLLNVSSTHGLAMVFSMLLAAIIWNLGTWYFGIPASSSHTLIGAIIGIGLTNALMTSTSVVDALNVPKMIQIFLSLILSPIVGLVIAGLMVFLLRRYWSSTKKQQRIHLTPAEREKKDGKRKPPFWTRTALILSAIGVSFSHGANDGQKGIGLIMLVLIGVAPAGFVVNMNATGYDIARTRDAVTHVQLYYQQHAEALPHAIALKPLVPAPETLPGTPAQFHCDTSRAMVAINHAQALLTDLKSYDDLTVDQRSQMRRLLMCVAETAGAVAKLPETSAENRRFLNNLRTDLLDTVEYAPTWIIVAVALALSLGTMVGWRRVAVTIGEKIGKKGMTYAQGVSAQMTAAVSIGIASYTGMPVSTTQVLSSAVAGTMLVDGGGVQSKTVKSIMLAWVLTLPISIFLSGALYWIALKFI

SEQ ID NO: 78278 - protein, 638 aa, Yersinia pestis
MDKTLLAGAISLSLVILPVQVLAFTPNVVGITVNDEVVIHGIQNVRDGGVINNGLVSDNAAITVTNGSSAGTANNTTVGDKGWLQITGALATGTIVNQGGLLDTKTAGTVIDSQINDGGHMTLGLNSQSKGYLNIAAGAELFVTNNDPYISDVTTHNPALPANVMIENLNVAGLVEIGPSWKGTSIVPLPLSDVLGPVLVTRINNVTLQGGDINLMAYSAGGQFNRLEIENLSGQGNFAMTTQLASNTGDFITVSQQATGQFGITVQDSGKEPQSADNLALVHINRGDAQFRLLNTGGVVDLGVYQYGLYSQESNGSTDWYLATSTEELPGTTPNVTAPMLSSAAQGVLNMAAAPRHILNAELSTLRQRQGELKADAEGTVGVWARYLTDDSRLSDNKNIAFKNTLSGMEIGADKQLGLNRGNMLIGAFTSYSSSDVKSTHDANGDIRSYGGGLYLTYLDQSGFYVDTVLKANRFNNKMNTQETRGEYNQNALTTSVESGYQWPVYANLVLEPYGKVSYSRIGSADYTLSNGMVAEVAKADSVQGELGTVLAASYSINQMTIKPYIKLAITREFTKSNAVAINNIGFDNDFSGNVGKYGVGINATVANNTAIFAEVDYLNGSKIETPVTANIGFRLRF

SEQ ID NO: 78279 - protein, 167 aa, Yersinia pestis
MSHIEKQAGELQEKLIAVNRVSKTVKGGRIFSFTALTVVGDGNGRVGFGYGKAREVPAAIQKAMEKARRAMINVALNNGTLQHPVKGAHTGSRVFMQPASEGTGIIAGGAMRAVLEVAGVHNVLAKAYGSTNPINVVRATIAALEDMKSPEMVAAKRGKSVEEILGK

SEQ ID NO: 78280 - protein, 144 aa, Yersinia pestis
MRLNTLSPAEGAKHAPKRVGRGIGSGLGKTAGRGHKGQNSRSGGGVRRGFEGGQMPLYRRLPKFGFTSRKAMITAEVRLSELALVEGDVIDLNTLKAANVVGIQMEFVKVILSGEVNRAVTLRGLRVTKGARAAIEAAGGKIEE

SEQ ID NO: 78281 - protein, 443 aa, Yersinia pestis
MAKQPGLDFQSAKGGLGELKRRLLFVIGALIVFRIGSFIPIPGIDATVLAKLLEQQRGTIIEMFNMFSGGALSRASIFALGIMPYISASIIIQLLTVVHPALAEIKKEGEAGRRKISQYTRYGTLVLAIFQSIGIATGLPNMPGMQGLVINPGFAFYFTAVVSLVTGTMFLMWLGEQITERGIGNGISIIIFAGIVAGLPPAIAHTIEQARQGDLHFLLLLLVAVLVFAVTFFVVFIERGQRRIVVNYAKRQQGRRVYAAQSTHLPLKVNMAGVIPAIFASSIILFPATIASWFGGGTGWNWLTTISMYLQPGQPLYVLLYASAIIFFCFFYTALVFNPRETADNLKKSGAFVPGIRPGEQTAKYIDKVMTRLTLIGAMYITFICLIPEFMRDAMKVPFYFGGTSLLIVVVVIMDFMAQVQTLMMSSQYESALKKANLKGYNR

SEQ ID NO: 78282 - protein, 118 aa, Yersinia pestis
MARIAGINIPDQKHTVIALTAIFGIGKTRSQAICVAAGIAEHVKISELSEEQIEKLRDEVAKYVVEGDLRREVTLSIKRLMDLGTYRGLRHRRGLPVRGQRTKTNARTRKGPRKPIKK

SEQ ID NO: 78283 - protein, 129 aa, Yersinia pestis
MAKAPIRARKRVRKTVSDGVAHIHASFNNTIVTITDRQGNALGWATAGGSGFRGSRKSTPFAAQVAAERCAEAVKEYGIKNLEVMVKGPGPGRESTIRALNAAGFRITNITDVTPIPHNGCRPPKKRRV

SEQ ID NO: 78284 - protein, 206 aa, Yersinia pestis
MARYLGPKLKLSRREGTDLFLKSGVRAIDTKCKIEQPPGQHGARKPRLSDYGVQLREKQKVRRIYGVLERQFRNYYKEAARLKGNTGANLLQLLEGRLDNVVYRMGFGATRAESRQLVSHKAIMVNGRVVNIASYQVSPNDVVSIREKAKKQSRVKAALELAEQREKPTWLEVDAVKMEGVFKRIPERTDLSADINEHLIVELYSK

SEQ ID NO: 78285 - protein, 329 aa, Yersinia pestis
MQGSVTEFLKPRLVDIEQVSSTHAKVTLEPLERGFGHTLGNALRRILLSSMPGCAVTEVEIDGVLHEYSTKEGVQEDILEILLNLKGLAVRVQGKDEVILTLNKSGIGPVTAADITHDGDVEIVKPQHVICHLTDENASINMRIKVQRGRGYVPASARIHSEEDERPIGRLLVDACYSPVERIAYNVEAARVEQRTDLDKLVIEMETNGTIDPEEAIRRAATILAEQLEAFVDLRDVRQPEVKEEKPEFDPILLRPVDDLELTVRSANCLKAEAIHYIGDLVQRTEVELLKTPNLGKKSLTEIKDVLASRGLSLGMRLENWPPASIADE

SEQ ID NO: 78286 - protein, 129 aa, Yersinia pestis
MRHRKSGRQLNRNSSHRQAMFRNMAGSLVRHEIIKTTLPKAKELRRVVEPLITLAKTDNVANRRLAFARTRDNEIVAKLFNELGPRFASRAGGYTRILKCGFRAGDNAPMAYIELVDRAASQAEVVAAE

SEQ ID NO: 78287 - protein, 329 aa, Yersinia pestis
MACGEFDLIARYFDRFRSNRRDVELGIGDDCALLTVAEKQLLAISTDTLVSGVHFLPDIDPADLGYKSLAVNLSDLSAMGADPAWLSLALTLPSVNEDWLQAFSDSLFDQLNYYGMQLIGGDTTRGPLSLTLTIHGFVPEGRALARAGARIGDWIYVTGTLGDSAAGLAILQNELRVDNETDRAALIHRHLRPQPRVLQGQALRMLASAAIDISDGLISDLQHILKASHCGARIELDMLPYSDALKNQVDTEQALRWALSGGEDYELCFTVPEINRGALEVALSNTGAGYTCIGQIGPQSEGVKFFREGKIVKLDFRGFDHFSTGKSHG

SEQ ID NO: 78288 - protein, 447 aa, Yersinia pestis
MNGLVSLESFLESLQRRDANQPEYLQAVREVFTSLWPFLEQNPHYREQSLLERLVEPERVIQFRVAWTDDKGHVQVNRAWRVQFSSAIGPYKGGMRFHPSVNLSILKFLGFEQTFKNALTTLPMGGGKGGSDFNPKGKSQAEVMRFCQALMTELYRHLGPDTDVPAGDIGVGGREVAFMAGMMKKLSNNTACVFTGKGLSFGGSLIRPEATGYGLVYFTDAMLKRHGLGFEGRKVSVSGAGNVAQYTIEKAMELGAKVVTASDSGGTVVDEVGFTPEKLAHLAEIKNKRYGTIEDYARERNLVYLAGQQPWSVPVDIALPCATQNELDLPAALQLIANGVKAVAEGANMPTTIQATDAFLEAGVLFAPGKAANAGGVATSGLEMAQNAARMSWKSEKVDVRLHHIMLDIHQSCVEYGGEGKQTHYVHGANIAGFVKVADAMLAQGVL

SEQ ID NO: 78289 - protein, 138 aa, Yersinia pestis
MKPAARRRARECAVQALYSWQLSKNDIADVELQFLSEQDVKDVDIAYFRELLSGVAVNAASLDALMAPFLSRQLEELGQVERAVLRIALFELSKRDDVPYKVAINEAIELAKTFGAEDSHKFVNGVLDKVAPTVRKRK

SEQ ID NO: 78290 - protein, 156 aa, Yersinia pestis
MNVIEGVVATPNARVAIAIARFNNFINDSLLDGAIDALKRIGQVSDDNITVVWVPGAYELPLVANVLAKTNRYDAVIALGTVIRGGTAHFEYVAGEASSGLSSVAMNSDIPVAFGVLTTESIEQAIERAGTKAGNKGAEAALTALEMINVIKAIKG

SEQ ID NO: 78291 - protein, 369 aa, Yersinia pestis
MQPDEFYMARAFELARLGRFTTSPNPNVGCVLVRDGEIVGEGYHLRAGEPHAEVHALRMAGEKARGATAYVTLEPCSHYGRTPPCADALVAAGVIRVVAAMQDPNPEVAGRGLYKLKQAGIAVDHGLMLAEAEAVNLGFLKRMRTGFPYVQLKMAASLDGRTAMASGESQWITSPQARQDVQRFRAESSAILSTSATVLADDPSLTVRWQDLDAETQVLYPHDSVRQPVKIILDSHNRVTPRHKVIQQDGPCWLARVDADDQPWPGNIEQLLLPRYGNGVDLVVLMMQLGKRNINSVWVEAGPQLAGALLQAGVVDELILYIAPKLLGSDARGLCELAGLTNLSQAPEFAFSDVRLVGPDLRLRLKPKY

SEQ ID NO: 78292 - protein, 297 aa, Yersinia pestis
MRYAFPTQQLKDNVMQTVKLNNGIAMPLLGFGVFQMTNTAECERAVIDAIETGYRLIDTAASYQNETQVGNALKLSGIARDELFITTKLWLQDTYYEGAKAQFERSLNRLQLDYVDLYLIHQPYGDVHGAWRAMEELHQAGKIRAIGVSNFHPDRLADLMAFNKIIPAVNQIEVNPFNQQLHAVPWMQSRGIQPEAWAPFAEGRNGLFQNPVLTAIGEKYGKSVGQVVLRWIFQRGIVSLAKSVRKGRMEENINILDFELSAEDMLQIAALDTATSAFFSHRDPAMVEWLTGRKLDV

SEQ ID NO: 78293 - protein, 280 aa, Yersinia pestis
MLSYRHSFHAGNHADVLKHTVQSLIIEAMKEKEKPFLYLDTHAGAGRYQLSGEHAERTGEYLDGIGKLWQRDDLPADLAPYMSAINYFNRGEKLRYYPGSPLIARHLLREDDKIHLTELHSSDYPLLRNEFAKDERAKVQRADGYQQLKSQLPPLSRRGFVLIDPPYEMKTDYQDVVKGIQEGYKRFATGTYALWYPVVLRQQIKRLLRDLEATGIRRILQIELAVRPDSDQHGMTASGMIVINPPWKLEQQMNSLLPWLHNVLVPSGHGHTLVKWVVPE

SEQ ID NO: 78294 - protein, 329 aa, Yersinia pestis
MQKRYLGKSGLEVSALGLGCMGLSYGYGPATDTRQAVELIRAAVERGVTFFDTAEVYGPYLNEEVVGEALKPFRDQVVIATKFGFTFGEDNKQQILNSRPEHIREAVEGSLRRLKTDVIDLLYQHRVDPDVPIEDVAGTVKDLIAEGKVKHFGLSEAGAQTIRRAHAIQPVAALQSEYSMWWREPEQEILPLLEELGIGFVPFSPLGKGFLTGAIKAGATFGEDDFRSKVPRFAAEALEANERLVALLGILAAEKGVTSAQIALAWLLAQKPWIVPIPGTTKLHRLEENLGAADITLSQDDIWNITQALATVKIVGERYPAAMQARVGR

SEQ ID NO: 78295 - protein, 450 aa, Yersinia pestis
MTKHYDYLAIGGGSGGIASINRAAMYGKKCALIEAKQLGGTCVNVGCVPKKVMWHAAQIAEAIHLYGPDYGFDTTVNHFDWKKLIANRTAYIDRIHQSYERGLGNNKVDVIQGFARFVDAHTVEVNGETITADHILIATGGRPSHPDIPGAEYGIDSDGFFELDEMPKRVAVVGAGYIAVEIAGVLNGLGTETHLFVRKHAPLRTFDPLIVETLLEVMNTEGPKLHTESVPKAVIKNADGSLTLQLENGTEVTVDHLIWAIGREPATDNLNLSVTGVKTNDKGYIEVDKFQNTNVKGIYAVGDNTGVVELTPVAVAAGRRLSERLFNNKPDEHLDYSNIPTVVFSHPPIGTIGLTEPQAREKFGDDQVKVYTSSFTAMYSAVTQHRQPCRMKLVCVGAEEKIVGIHGIGFGMDEILQGFAVAMKMGATKKDFDNTVAIHPTAAEEFVTMR

SEQ ID NO: 78296 - protein, 375 aa, Yersinia pestis
MPTSYLKEDTARQIVQRTMSIIDYSVNVMNEYGVIIASGDPRRLHQRHEGAVLALTENRMVMIDEAVAGRLKGVKPGINLPIIFRQRMVGVIGISGEPDKVQAYAELVRMAAELILEQAEMLEQNQWEKRYREQLTSQLIAQQGSAASVASMAAYLGLDLTLPRIALIVSLREQEHTQQRDLVEILSNHSRETLVTLHGFERVVVLLPLNLAHSDDREVTARKALRKLYALLQPRFSLNIYVGGIFDGLDGLQRSYLSAQAMQETALRQKLTQPVMFYQDHFLTVLLNDFAGSWQAGELSSAWQTLRQADTKDVLCHTLRCYFVQNCDLSQTSKQLHIHVNTLRYRLQKIEAITALKINELSSIIQLYIGMKIER

SEQ ID NO: 78297 - protein, 639 aa, Yersinia pestis
MRIWQKFLLLFCCWVLSGPLVWASTDYSLWVNDIQSRLDKTAQLYQQQKTDEARAMVQMAYFEVFENLEGPIRINISAQKSFQMEAAFGEIRRMIGEGKSQADVDNKINWLKGELTGVLPVLVDGHKLTAEQQHAAYENSDIAVYWQQSFRIIDDLLAQAISEYQDGKYAEASKSVQQAHYQGFKNSEMEMSVRGNRSAQQAAEINQQFTALIDLARQPDKMTEVAYRVTGLLHTIEDILPGLPTTREQQQITVDQPISSDAIPDTQANADWAQVSSKINQAVTEAIGQYQQGKITPAMMAVQDAYFDLFEASGMENKVGSRDAAFKSTLEGHFTRLVGLMKAEKPVEQLQAEAVALQKDLVNAAEMLGDGGETDWSLFVYSLLIIVREGLEALLIVAAIVAYLVKNNHQDKLPLIRQSVVVALIASVLTAFIFQWLFANSGQSRELLEGFTMMIAVVMLFSMSYWLLSKAEARNWKAYLEGKFAKSLSSGSIIGLWLTSFLAVYREGAETVLFYLALIGDANTTSGHLSVLAGFGVGCVILLVAYLVMRFTVVKLPLKPFFIFTGGFMYLMAFVFAGKSVLELIEGKLFEPTLLPGVPEISWLGIYPYVETLIPQGVLLIAALVALWVMQWRSRTVHR

SEQ ID NO: 78298 - protein, 458 aa, Yersinia pestis
MKIIILGAGQVGGTLAENLVGENNDITVVDIDSGRLRQLQDKFDLRVVQGYGSHPRVLREAGAEDADMLVAVTNSDETNMIACQIAYSLFNTPNRIARIRSTEYIREADKLFLPEAVPIDHLISPEQLVIDYIYKLIEYPGALQVVNFAEGKVSIAAVKAYYGGPLVGNALSSLREHMPHIDTRVAAIFRQDRPIRPQGSTIIEAGDEVFFVAASQHIRAVMSELQRLEKPYKRIMIVGGGNVGAGLALRLEKDYSVKLIERDQQRAAELAEMLHDTIVFYGDASDQELLAEEHIEQVDVFIAITNDDEANIMSAMLAKRMGAKKAMVLIQRSAYVDLVQGSVIDIVISPQQATISALLGHVRKADIVSVSSLRRGVAEAIEAIAHGDESTSKVVGRMVEDIKLPPGTTIGAIVRGDEVIIANSNSIIKQGDHVIMFITHKKFVPDVERLFQPSPFFL

SEQ ID NO: 78299 - protein, 439 aa, Yersinia pestis
MVESALTQNKYSLWKQGVCWLLLLGPLFFLSYGQVNQFTATRYDVGSRVFAWEHAIPFMPWTIVPYWSIDLLYGISLFICTSKQELTRHGCRLLASSLIACAGFLLFPLKFTFVRPETQDMFGWLFHQLELFDLPYNQAPSLHIILTWLLWLRFRQHLNRGARMVSGAWFLLIAASVLTTWQHHFVDVLSGFIVAVVISYAIPIEGQWRWKRPSPHALRLAAKYTLGGIIFLLAGVLIPGSYFLLWPAGALLMVSAGYVGLGTSLFQKNEHGHLSLSARLLLWPYLTGARLSKMWFSRHIPKTSAILDGVSLGCFPDKSLQQTAVLDLTAEFHHRTRVPGVWYAYPLMDLVVPDVQDIAQAVAKLTELRQGHLTVVVCCALGLSRSATVVAAWLLAQGHVSCVQEAIDLIKSQRPQVVLTPAYIHALEQFQGTLCQISL

SEQ ID NO: 78300 - protein, 429 aa, Yersinia pestis
MKNTYNLRSIAAKAISQVLDQGQSLSAVLPELQKNISDKDRALLQELCFGTLRVLPQLEWCIQQLMARPMTGKQRVFHYLIMVGLYQLIYTRIPPHAALAETVEGATVLKRPQLKGLINGVLRQFQRQQVELLERAVNNDSHYLHPSWLLARIKQAYPAQWQQILDANNQRPPMWLRVNRLHHSRSEYLELLTQADINAEPHPIYRDAVRLITPCAVNHLPGFELGWVTVQDASAQGCVDLLDPQNGEQILDLCAAPGGKTTHILEAAPKAHVLAVDIDEQRLSRVKENLQRLQLQAVVRVGDGRAPDTWCGDQQFDRILLDAPCSATGVIRRHPDIKWLRRDRDISELAQLQSEIIEAIWPKLKHGGVLVYATCSILPEENQQQIAAFLQRHPEAQLTETGTTAAPGKQNLPHPEDGDGFFYAKIIKK

SEQ ID NO: 78301 - protein, 273 aa, Yersinia pestis
MDQKFAVFGNPISHSKSPRIHTLFSEQTGIEHRYGKVLAPSEAFENTLVSFFADGAQGANITTPFKERAYDQCDELTDRASLAGAVNTIKRLEDGRLLGDNTDGIGLLSDLERQNLIRTTDHILLVGAGGAARGVILPLLSYGCTVVVTNRTHTRAQQLAKVFNHIGDIDVCEMSELAGQRFDLVINATASGLHGEVPNLPAAILTSQTRCYDMFYQAGTTPFLAWAQRLGLADYADGLGMLVGQAAHAFKLWHGVMPEITPVLAQLRSELGK

SEQ ID NO: 78302 - protein, 374 aa, Yersinia pestis
MKYELQKTDGRARRGRLVFERGVVETPAFMPVGTYGTVKGMTPEEVKETGAQILLGNTFHLWLRPGQEIMKLHGDLHDFMQWHGPILTDSGGFQVFSLGAMRKIKEEGVHFKNPINGDSVFLSPEKSMEIQYDLGSDIVMIFDECTPYPADWDYAKRSMEMSLRWAARSRQRFDELNNKNALFGIIQGGVYEDLRDVSVKGLVDIGFDGYAVGGLAVGEPKEDMHRILEHVCPQIPEDKPRYLMGVGKPEDLVEGVRRGIDMFDCVMPTRNARNGHLFVTDGVVKIRNAKHKDDTATLDEHCDCYTCRHYSRAYLHHLDRCNEILGARLNTIHNLRYYQRLMAGLRQAIEEGKLEHFVEDFYGRIGKPVPPLNV

SEQ ID NO: 78303 - protein, 356 aa, Yersinia pestis
MRVADFSFELPEALIAHYPQPQRSGCRLLSLDGPTGTLTHGIFTDLLDKLAPGDLLVFNNTRVIPARLFGRKASGGKLEVLVERVLDDHRVLAHVKASKAPKPGAELLLGDDESIRATMLARHDTLFELRFDDERDVFTILNAVGHMPLPPYIDRPDEDADRELYQTVYSQRPGAVAAPTAGLHFDEPMLAALQEKGIEMAFVTLHVGAGTFQPVRVDTIEDHIMHSEYAEVPQEVVDAVLACKARGKRVVAVGTTSVRSLESAAKAAENGLIAPFFGDTRIFIYPGYHYQVVDALVTNFHLPESTLIMLVSAFAGYKNTMNAYQQAVAEQYRFFSYGDAMFISRNPRAPQEKVSP

SEQ ID NO: 78304 - protein, 587 aa, Yersinia pestis
MSQEVRLFQEGMFTASDETSLYFRHWSATEGNSKKVIVLFHRGHEHSGRLQHIVDELMMPDTHFYAWDARGHGQSPGARGYSPSLARSVLDVDEFVRFVAQDAQVNLDDIVVIAQSVGAVLVSTWVHDYAPKIRGMVLASPAFKVKLYVPFARLGLGLMQRIRGLFYVNSYVKGKFLSHDPERIASFEQDKLITRQIAVNILLDLYKTAERIVSDSTAITLPTQLLISGDDFVVHEKPQKQFYAGLRSAIKEQHILPGFYHDTLGEKDRSIAFDKMKNFIDRLYATAPYAFDYSHEDRWSPSADAYRELQAPPKSRSLEGMFYAALSFGMKTIGRQSKGMLLGYETGFDSGSTLDYVYRNQPEGNGILGRMIDHNYLNSVGWRGIRVRKVNIQQMIEQAVAKIQLSHMPVRVVDIAAGHGRYVLDALEKQQGIESILLRDYSDLNVEKGQAMIEERGLSHVAQFRKGNAFDYDSLATLDPAPTLGIVSGLYELFPDNDLIKTSLAGLAAAIPPGGMLVYTGQPWHPQLKTIAYTLTSHQNGIPWMMRVRSQKEMDTLVEQAGFEKCHQVIDEFGIFTVSLAVRKQHG

SEQ ID NO: 78305 - protein, 1070 aa, Yersinia pestis
MKTNRSTLSPCFRKTMIASLLVPLCSPLYSWAVQTASITDGSTMVISGGYDTEANNHSAVFVQGSGSTINGGSDVVIETTGVGAIGAYASEGGSLGLTGSTINTENGVAFGVLNDKGTVNLQGGTITTKGQTAYGVYSSGLGSNTDIHSSAITTSYSLTHAIYGAGGTGLTLNNTTLNTSGSGSYGIYLDGSGGSLTGANNTINSTHATKGAGIYISAGGSNATLDNTTLNITKGAVGVNVGEGSSITMDGLIATGNITNLFKVNGNASVSNANIELAAGGVLMAQGSSASNQAVIILNNVNVISNSGSTTLVDVNKDADVTINGGAYHSKGNNAKGIWVRDNNSSLNVDNAVIITEGVNATAIENRGTAIVKNTTVITKGNNSHGLYSEQSLDATNMAISTAGIGSIGVAAAKGGNLNLNDAFIETTGNSGMVLGTFADSSISAKNITGISTGAGAYALWVDDGSSILLEESQITTQGQGAGGIYASNTGTGSHTAYTQVTLNNSQIHSEQGPGIWANGADINVDVKNGSQLTGGNGLLVYASSNAGAASNVNVNGDNHAVLLGDIHAAENSNINLALNNNSVWTGAATNAKQVDIDSSSIWNLTGDADVESMHVLGQMNFISNSSDTNSRAPYDNFSTLTINSNVTGSGSFTFNVQLGDNDSPVDRLYVIGNASGDHGVQVINQGGLGALTTGDGINLITVDGETHSGSFTMSNSVSAGAYEYFLYKIDDYRWNLQSNLINPGPGPEPEIEPEEIAYRPEVPGYIAAPWLNAFYGFTTLGSLHERRGSAEGAAEGFNQDSWGRIRGQHNNFDAGRFSYDSNIWFMQLGHDVYQAKNAAGTQVTGGMMITLGKQNSDTRDRARAINPDLSIDTGKIKTEAYGFGGYYTLMTEEGGYLDIVSQATLYRNNYESQHNTKHNGYGVVMSAEVGQPYPLAAGWVVEPQGQLKYQYLHLSPKNFNDSISEIGGTDYSVGQVRGGLRLFSDASEKRDIKPYLTTDVLHQLGRNPQVTVATVDIRPDFTKTFWQGGAGVTAKVNSQVDLYADAKYQKSFDGKLDGYLGNLGVKVSF

SEQ ID NO: 78306 - protein, 200 aa, Yersinia pestis
MVLVTRQAPDFTAAAVLGNGEIVENFNLKKHLNGRPAVLFFWPMDFTFVCPSELIAFDHRYEEFQKRGVEVVGVSFDSEFVHNAWRKTPVDKGGIGEVKYPMVADIKREIQKAYGIEHPDAGVALRGSFLIDKNGIVRSQIVNDLPIGRNIDEMIRTVDALQFHEEHGEVCPAQWEKGKAGMGASPDGVAKYLSENASKL

SEQ ID NO: 78307 - protein, 210 aa, Yersinia pestis
MNRMLRWIFTLCIAYPVVWIWLGVRVAGRKKLPRDGPAIIVANHNSHLDVLTLFTLFPLSTLVKVQPVAAADYFLKNKVISWFALKVIGIIPVYRGAHQANPLQACVDALAEKKIVIIFPEGTRGEPGKFSEIKSGIWHLSQRCPEVPIIPVYMHGLDRSMGKGQKIPVPFFIDIFIDDPLFYDAEKVTFKQLLLNRFVALQQLATRKTS

SEQ ID NO: 78308 - protein, 609 aa, Yersinia pestis
MLSGWHLPVSPFVRLADDALHITLWLQGDSLPAQVFLRCEPDNEEWLLTMEGHESHDRWRYSVSLPLYEGQPTRRYCFKLLWDDRQQWFGPLGFSVIPPAQLAQFAVDVPDSGPDWVADQVFYQIFPDRFASSQADHGVQEGSYIHHAAGCPVSRREWQQPLDDVHAASTFYGGDLAGISQKIPYFQQLGVTALYLNPIFTAPSVHKYDTEDYYQVDPYLGGERDFLQLRAATREVGIKLVLDGVFNHTGDSHRWFDRYQQGENGACHHEDSPYRGWFTFLPDGRALDWKGNASLPKLNFANEEVAERIYRSDDSVVRYWLRPPYSIDGWRLDVVHMLGEDGGAKGNLHHLHGIYQAAKEENPQAYILGEHFGDARNWLHAGVEDAAMNYMGFALPVRSFLAELDVACHPIKLDAADCAYWMDEYRAGLPHSQQLRLFNQLDSHDTARFLTLLKGDKTRMQMALIWLFSWIGVPCLFYGDEIGLDGGNDPFCRKPFPWDEAQWDHDLLSLCQRMAALRHKSIALRRGGCQVIHASGDSLVFIRSYQTERVMVAIQRSDDADIFLPASPLLNVAEWQRLEGGGDLAVSETGVNMGLEGKSVTLWCGVGEC

SEQ ID NO: 78309 - protein, 673 aa, Yersinia pestis
MAKLLIFIKSLIVGMMIVSTMGCAEKPTFVPPAQRALPQSERPWQKNTFVVIAYHDVEDDSADQRYLSVRSSALNEQFVWLRDNGYHVVSVDQILAARNGGPTLPDKAVLLTFDDGYSSFYRRVYPLLKAYKWSAVLAPVGTWIDTATDKKVDFGGLSTDRDRFATWKQITEMSKSGLVEIGAHTYASHYGVIANPQGNTEPAAANLQYDPKTKQYETVEAFKQRMEKDVALITQRIVQATGKQPRVWVWPYGAPNGTVLNILRQHGYQLAMTLDPGVANINDLMNIPRILISNNPSLKDFALTVTSVQEKNIMRVAHVDLDYLYDPDPAQEKENLDKLVQRISDLRVTHVFLQAFSDPKGDGNIRQVYFPNRWIPMRQDLFNRVVWQLASRPDVEVYAWMPVLAFDMDPSLPRITRIDPKTGKTSIDPDQYRRLSPFNPEVRQRIIDIYRDMAYSAPIDGIIYHDDAVMSDFEDASPDAIRAYEKAGFPGSITTIRQDPEMMQRWTRYKSKYLIDFTNELTREVRDIRGPQVKSARNIFAMPILEPESEAWFAQNLDDFLANYDWVAPMAMPLMEKVPLSESNEWLAELVNKVAQRPGALEKTVFELQSKDWTQPEGNNAISGPILAGWMRQLQLSGAQSFGYYPDNFITGEPPLKDVRPVLSSAWYPLYDR

SEQ ID NO: 78310 - protein, 208 aa, Yersinia pestis
MKIVEVKHPLVKHKLGLMRENDISTKRFRELASEVGSLLTYVATADLETETVTIEGWNGPVEIEQIKGKKITVVPILRAGLGMMEGVLENVPSARISVVGVYRDEETLKPVPYFQKLVSNINERMALVVDPMLATGGSMIATIDLLKKAGCQSIKVLVLVAAPEGIKALEEAHPDVELYTASIDQGLNEHGYIIPGLGDAGDKIFGTK

SEQ ID NO: 78311 - protein, 444 aa, Yersinia pestis
MIDRIIALLILCLVLSIPAGMILLFTGDVLLNFVFFYPLFMSGIWITGGGYFWLRRERHWPWGDDVPAPELKGHPLVSILVPCFNEGLNARETIHAALAQTYTNIEVIAINDGSSDDTAQVLDALLAEDPRLRVIHLAHNQGKAIALRMGAAAARSEYLVCIDGDALLDKNAVPYLVAPLIANPRTGAVTGNPRIRTRSTLIGRVQVGEFSSIIGLIKRTQRVYGQVFTVSGVVAAFRRRALADVGYWSPDMITEDIDISWKLQLKHWSVFFEPRGLCWILMPETLRGLWKQRLRWAQGGAEVFLKNMFKLWRWRNRRMWLLFLEYSLSITWAFTYLFSITLYLLGLVITLPPGIHVQSVFPPAFTGMVLALTCLLQFAISLVIERRYEPKLGHSLFWIIWYPMVYWMLNLFTTVVSFPKVMLITKRKRARWVSPDRGIGRVKS

SEQ ID NO: 78312 - protein, 652 aa, Yersinia pestis
MSQIHKHPIPAAIAEHALITPEKYQHYYQQSVQNPDEFWGEQGKIIDWIKPYKTVKNTSFDPGHVSIRWFEDGTLNLAANCLDRHLAERGDQTAIIWEGDDPNQSKTVTYKQLHHDVCQFANVLKSLGVKKGDVVAIYMPMVPEAAVAMLACARIGAVHSVIFGGFSPDAVAGRIIDSHSKLVITADEGIRAGRAIPLKKNVDEALKNPAITSIKNVVVFQRTGNASYWEDGRDVWWHDLIKEASADCPPEEMNAEDPLFILYTSGSTGKPKGVVHTTGGYLVYAALTFKYVFDYHPGDIYWCTADVGWVTGHSYLLYGPLACGAITLMFEGVPNYPGVNRLSQVVDKHKVNILYTAPTAIRALMAEGDKAIEGTKRDSLRIMGSVGEPINPEAWEWYYNKIGNSKCPIVDTWWQTETGGFMITPLPGATELKAGSATRPFFGVQPALVDNLGNPQEGVAEGNLVITDSWPGQARTLFGDHERFEQTYFSTFKGMYFSGDGARRDEDGYYWITGRVDDVLNVSGHRLGTAEIESALVAHPKIAEAAVVGVPHNIKGQAIYAYITLNHGEEPTPELYTEVRNWVRKEIGPLATPDILHWTDSLPKTRSGKIMRRILRKIATGDTSNLGDTSTLADPSVVEKLLEEKQSMQTPS

SEQ ID NO: 78313 - protein, 463 aa, Yersinia pestis
MELPVKNKLKRGLTTRHIRFIALGSAIGTGLFYGSADAIRMAGPSVLLAYLIGGVVAFVIMRALGEMSVNNPQASSFSRYAQDCLGPMAGYITGWTYCFEILIVAIADVTAFGIYMGLWFPDVAHWVWVLSVVLIIGAVNMMSVKVFGELEFWFSFFKVATIIIMILAGIGIIVWGIGNGGQPTGIHNLWTNGGFFSNGFVGMLLSLQLVMFAYGGIEIIGITAGEAEDPKKSIPKAINSVPWRILVFYVGTLFVIMSIYPWNQVGTNGSPFVLTFQHMGITIAAGILNFVVITASVSAINSDVFGVGRMLNGMAEQGHAPKAFTAISKRGVPWVTVLVMMCAMLIAVYLNYIMPENVFLVIASLATFATVWVWIMILFSQIAFRRSLSKDQVKALDFPLRGGTFTSVLAIIFLVFIIGLIGWFPTTRISLYVGLVWIVLLLVGYYFKVKYQKKQATLIKNAD

SEQ ID NO: 78314 - protein, 439 aa, Yersinia pestis
MSHRLSSKDIMALGFMTFALFVGAGNIIFPPMVGLQSGEHVWWAALGFLITAVGLPVITVIALARVGGGIDALSTPIGRSAGLVLATVCYLAVGPLFAIPRTATVSFEVGIAPLTGNGPLPLFIYSVVYFALVIGISLYPGRLLDTVGHILAPLKILALAILGIAALIWPAGPLITATDAYQQAPFSSGFVNGYLTMDTLGALVFGIVIVNAARSRGVVSAVLLTRYTIWAGLIAGIGLTLVYLSLFKLGSSSGSLVPDAQNGAVILHAYVQHTFGGLGSMFLAALIFIACMVTAVGLTCACAEFFAQYLRLSYRTLVFILGIFSMLVSNLGLSHLIQISIPVLTAIYPPCIVLVLMSFTLRWWQHASRIVAPVMLISLVFGILDAVKASTFANFLPAWAHHLPLAEQGLAWLPPSLLVFVVIGLYDRIFCRQKIVVKQ

SEQ ID NO: 78315 - protein, 438 aa, Yersinia pestis
MLERLSWKTLALELALFCLPALLLGAFIGYLPWLLLVSVVAALTWNFYNQLKLSHWLWLDRSMTPPSGRWSWEPLFYGLYQMQLRNRRRRRELALLIKRFRSGAESLPDAVVITTVDGNIFWCNGLAQQLLGFRWPEDNGQHILNLLRYPEFSQYLQQQTFSRPLTLQLNNGYYVEFRVMPYSEGQLLMVARDVTQMRQLEGARRNFFANVSHELRTPLTVLQGYLEMMHDQELAGPLRDKALGTMQEQTKRMDGLVKQLLTLSRIEAAPNVDLNERVDIPLMLKILQHEVQALSNGRHEITFRVNDQLKVFGNEDQLRSAVSNLVYNAVNHTPEGTKIEVCWQQTPQGAQFQVSDNGPGIPPEHVPRLTERFYRVDKARSRQTGGSGLGLAIVKHALSHHDARLEVMSEIGLGTRFIFTLPNRLIVPTVLVENAVKS

SEQ ID NO: 78316 - protein, 429 aa, Yersinia pestis
MKVSIFKTLYFQVLTAITIGVLLGHFYPEIGAQMKPLGDGFVKLIKMIIAPVIFCTVVTGIAGMESMKAVGRTGAIALLYFEIVSTLALLIGLVVVNVAQPGVGMNIDPATLDAKAVALYAEQASQQGIIPFLLDIIPGSVVGAFASGNILQVLLFAVLFGFALHRLGEKGQLIFNVIESFSRVIFGVINMIMRLAPLGAFGAMAFTIGKYGVGSLVQLGQLILCFYLTCILFVVLVLGTIAKFNGFNIFKFIRYIKEELLIVLGTSSSESVLPRMLDKMENAGCKKSVVGLVIPTGYSFNLDGTSIYLTMAAVFIAQATNTHMDIMHQVTLLVVLLLSSKGAAGVTGSGFIVLAATISAVGHLPLAGLALILGIDRFMSEARALTNLVGNGVATIVVAKWCKQLDNDQLQAVLSNKVLPNVKSSVSVS

SEQ ID NO: 78317 - protein, 414 aa, Yersinia pestis
MRIIHTSDWHLGQYFFTKSRAAEHQAFLHWLIEQIKEHQVDALIVAGDIFDTGAPPSYARELYNRFIVELQPTACQLVVLGGNHDSVATLNESRDLLSYLNTSVISCASRDLKQQVIILKNRQQQPAAVLCAIPFLRPRDLVTSQAGESGDQKQLALQEAIAGHYQTLYQRALELRSQLGLPLPIIATGHLTTVGVTTTDSVRDIYIGTLDAFPAQAFPPADYIALGHIHRAQQVAKTEHIRYSGSPIALSFDELSKEKSVYLVEFDQQNLSSVTPLFIPQFQPMQLIKGDLRQIEQQLAAFAGHEGLPVWLDIEVATQDYLTDIQRRIQALAANLPVEVVLLRRSKEQRNNSIHRQEKETLNELTVSDVFERRLALEADLPEPRQQRMRQMFNYVVDEIAQDGSNGVAEEPAQ

SEQ ID NO: 78318 - protein, 671 aa, Yersinia pestis
MRVRRSLTIKQMAAVAVVALVTICIFIILQLFHFVQQRKDDYANQLESIAYSVRQPLSEAILSVDIPQAKKILNSLLPIGILSRAEVILPNQIQVLHANFPTERPIPHWAKRVFSLPVQITVPLYALERVPANPQPLAHLVLRADSFRMYQFILSALSAMLSTYLLLALVLSVSIAWCINRLIIHPLRAMAKELEDIGDHGVLHHQLTLPAHHQDDELGVLVRNYNRNQQLLADAYADMGRISHRFPVTELPNRSLFISLLEKEIASSTRTDHFHLLVIGIETLQEVSGAMSEAQHQQLLLTIVQRIEQCIDDSDLLAQLSKTEFAVLARGTRRSFPAMQLARRIMSQVTQPLFFDEITLRPSASIGITRYQAQQDTAESMMRNASTAMMAAHHEGRNQIMVFEPHLIEKTHKRLTQENDLLQAIENHDFTLFLQPQWDMKRQQVIGAEALLRWCQPDGSYVLPSGFVHFAEEEGMMVPLGNWVLEEACRILADWKARGVSLPLSVNISGLQVQNKQFLPHLKTLISHYHIDPQQLLLEITETAQIQDLDEALRLLRELQGLGLLIALDDFGIGYSSLRYLNHLKSLPIHMIKLDKSFVKNLPEDDAIARIISCVSDVLKVRVMAEGVETEEQRQWLLEHGIQCGQGFLFSPPLPRAEFEAQYFSSAHHVS

SEQ ID NO: 78319 - protein, 593 aa, Yersinia pestis
MKRYLTPLVNQIALLMILLGMLGLAGMVISSWMAQSIQGNAHAINQAGSLRMQSYRLLSMIPLDSNELSYLVALEQDKTSHDLQQALLREGLMGQYQQIERYWQDTLKPQLQQAKHPDEVAASVADFVHQLDALVLAIDHKTEQRLLQVTLIPLVFSLLTLSLLLAMIYYLRRRLLRPWLKLISMANAIGRGDFSQRYTLDYQRDEMGMLGTALNRMSQELSLIYGDLEQRVVNKTADLQQKNQVLAFLYHSSRQLHTHQPLSERLAPVIEQLQALTTLENVQICLYENHLYRDHVNHNADAEYLMPKNRPASLTISGPVRPISHPELWQSLSWSLSDKLGQYGLLLAKQPLDNPLNSDQQQLVDMLVEQLTSTLALESQAKHQQQLLLMEERSAIARELHDSIAQSLSCLKIQISCLQMQTPDLPENSNLLIKQMRDELNIAYRQLRELLTTFRLKLNEATLEAALQALVNEFSERAGLSITFKYQLPPDQVPNHQAIHMVNIVREALNNIYKHARASEATVNVHLEQGDVVMSITDNGCGIGQASEQPNHYGLMIMQDRANSLHGHCSINQKEGGGTEVRVQFTPENNDLD

SEQ ID NO: 78320 - protein, 473 aa, Yersinia pestis
MTRYEQLAQQIRAQIQSKVWQAGDKLPSLRESCKQSGLSLMTVVQSYQLLESQGWIVARPQSGYYVASRPTQLPQPQRGNKLHLDEQVDINTFIFNVLQAGKDPAIMPFGSAFPDPSLLLQPRLSRALASVARKISPQSSVTNLPPGNESLRRNIAQRYAACGMNVSPEEIVITAGAMESLSLSLQAVTQPGDWVVIESPAFYGALQAIERLRLKAIAITTDPQQGVDLEALEQVISQYPIKACWLMPHFQNPMGATMPWSQKQRLVTLLQQKAISLIEDDVYGELYFGAERLLPAKALDQHRQILHCSSFSKCLAPGFRVGWVAAGEHAQRIQHLQLMSTVSASVPTQLAIADYLSQGGYDTHLRRLRRVMEQRMSTLHQAVVEHFPKNIKISHPAGGYFLWLELEPPFNASELYRRALEQGVSIAPGRMFTTGSQFDHCFRLNASFAWSEQSAKAIRILAKLIGQLTNERR

SEQ ID NO: 78321 - protein, 335 aa, Yersinia pestis
MPAETGKKPLLQAIDLKKYYPVKKGFFTPERLVKALDGVSFTLERGKTLAVVGESGCGKSTLGRLLTMIEIPTGGELYYQGQDLLKPDESAEKLRRQKIQIVFQNPYGSLNPRKKVGQILEEPLQINTQLNRKERREKTLAMMAKVGLKTEHYDRYPHMFSGGQRQRIAIARGLMLNPDVVIADEPVSALDVSVRAQVLNLMMDLQQELGLSYVFISHDLSVVEHIADDVMVMYLGRCVEKGSKEAIFNNPRHPYTQALLSATPRLNPDMRRERIKLTGELPSPMNPPPGCAFNARCRRAFGTCSQLQPQLKQYGDQMVACFAVDQDEAEKVVSV

SEQ ID NO: 78322 - protein, 414 aa, Yersinia pestis
MEQPSPVTRQSFDEWIVPTYAPADFIVVRGEGSTLWDQQGKSYIDFAGGIAVNALGHGHPAVRAALIEQADKVWHLGNGYTNEPVLRLAKQLIDATFAEKVFFCNSGAEANEAALKLARKYALDNFANKAGQQGEKNQIVAFRNAFHGRTLFTVSAGGQPKYSQDFAPLPGGIHHGIFNDLASAEHLITDQTCAVIVEPIQGEGGVLPADKEFLHGLRALCDRHNALLIFDEIQTGVGRTGELYAYMHYGVSPDVLTSAKALGGGFPIGAMLTTTKYASALSVGSHGTTFGGNPLACAVAGTVLSLINQPTLLAGVKARHQWFIDELAEINARHNVFAEIRGRGLLIGCVLNAQYAGKSKEIVQAAAQYGLIALIAGPDVVRFAPSLIISPKEIKEGLARLAMGIEQVCQKVTS

SEQ ID NO: 78323 - protein, 505 aa, Yersinia pestis
MSQHVMFNAVLSSHPALFIQGEWRIGNGVSFEKQDPMSQQRLWQARAADHTDVTLACHAARAAFPAWARASLEQRATVIQQFAALLEQHKQSLARTISLETSKPYWETLTEVQAMIGKVAISLQAYQTRTGHSQTPMGDSMSVLRHRPHGVLAVFGPYNFPGHLPNGHIVPALLAGNTVVFKPSELTPWTAEETVKLWQQAGIPDGVLNLVQGGRETGEALAAQPDIDGLLFTGSAHTGYHLHRQLAGQPEKMLALEMGGNNALIVEQVKDRDAVVNLAIQSAFISAGQRCTCSRRLLVKTGAEGDAFLLRFTAVAQALRIGRWDEQPAPFMGAVISSQAAERMLAAQQHLLLLGGESLLNMTRPDSQSALLTPGIIDITNISEVPDEEYFGPLVSVIRYTDFTEALKIANQTRFGLAVGLVSEDRQQFEQLLLEARAGIVNWNKPLTGASSAAPFGGVGASGNHRPSAFYAADYCAWPMASLECEHLTLPATLSPGISFDLPKV

SEQ ID NO: 78324 - protein, 315 aa, Yersinia pestis
MLQFILRRLGLVIPTFIGITLLTFAFVHMIPGDPVTIMAGERGISAERHAQVMAEMGLDKPLYQQYFRYVNGVLHGDLGISLKSRIAVWDEFVPRFKATLELGICAMLFAIAVGIPVGVLAAVKRGSIFDHTAVGISLTGYSMPIFWWGIMLIMLVSVQWDLTPVSGRVSDTVFLDDSLPLTGFMLIDTLIWGEPDDFKDAVMHMILPAIVLGTIPLAVIVRMTRSSMLEVLGEDYIRTARAKGLSRMRVIVVHALRNALLPVITVIGLQVGTMLAGAILTETIFSWPGLGRWLMDALQRRDYPVVQGGCCWSRS

SEQ ID NO: 78325 - protein, 535 aa, Yersinia pestis
MTISLRRTGILKFGIGLVALTIAASVQAKTLVYCSEGSPEGFNPQLFTSGTTYDASSVPIYNRLVEFKIGTTEIEPSLAERWEVSEDGKTYTFYLRKGVKWQDNKDFKPTRDFNADDVIYSFMRQKDDKNPYHKVSGGSYEYFQGMGMGDLITNVVKVDDNTVRFELTRPESPFLADLAMDFASILSAEYADNMLKAGTPEKVDLNPIGTGPFQLQQYQKDSRILYKAFPGFWGTKPKIDRLVFSITPDASVRYAKLQKNECQIMPYPNPADIARMKEDKTINLMEQPGLNVGYLSFNIEKKPLDNLKVRQALTMAVNKDAIIDAVYQGAGQAAKNLIPPTMWGYNDDVKDYAYDPAKAKELLKEAGLPDGFSIDLWAMPVQRPYNPNARRMAEMIQSDWAKIGVKAKIVTYEWGEYLKRAKDGEHETVMMGWTGDNGDPDNFFATLFSCDAAKQGSNYSKWCYKPFEDLIQPARAEADHDKRVALYKQAQVVMNEQAPALIIAHSTVYEPVRKEVKGYVVDPLGKHHFDNVSLD

SEQ ID NO: 78326 - protein, 330 aa, Yersinia pestis
MLDFLAITLSGKPPQVIQGETVNLKWQWLGEGILTLVPHRSYTQSVVISAGIHGNETAPIEILNQLVTDLLAGQLPLSVRLLVLLGNPPAIRKGKRYLSNDINRMFGGRYQHYTPSDETRRASTLEQRVMAFFQASHTSERLHYDLHTAIRGSYHPRFGLLPYQQTPYSAAMFRWLRDIELDALVMHTSAGGTFAHFSSERCQAASCTLELGKALPFGENQLSQFSAITQGLRSLVSDSALPARKTENMKYYRVVKSLLRQHPDFKLRVAEDTVNFTRFAQGTLLTEQPNDNYRVEHPYEWILFPNPHVALGLRAGMMLVKMCESELPIT

SEQ ID NO: 78327 - protein, 419 aa, Yersinia pestis
MNLLEHMGKAAKQASWQLAMLSTAKKNQALAVIANLLESESQTILQANERDMAAARESGMSEALLDRLLLTPARLAAIANDVRQVCRLNDPVGRVIDGSLLDSGLKLERRRVPLGVIGVIYEARPNVTIDVASLCLKTGNAVILRGGKETHYTNQATVNVIQRALEQCGLPAAAVQAIESPDRQLVNELLRLDRYVDMLIPRGGASLHKLCREQSTIPVITGGIGVCHTFVDENADFEKALLVIENAKIQRPSACNSLETLLVHQAVAKTFLPLLSARMHAFGVTLHASPLAMPYLADGKAKVVAVEAADYDDEWLSLDLNVDIVTDIDAAIDHIREHGTSHSDAILTRSLSHAEYFVRAVDSSAVYVNASTRFTDGGQFGLGAEVAVSTQKLHARGPMGLDALTTYKWIGYGDDLVRS

SEQ ID NO: 78328 - protein, 255 aa, Yersinia pestis
MAEQSTVLQLSAAMDDIPAPIYQRVKLAIIRQIRTGTWQPHQRVPSESELVTELGVSRMTINRALRELTNEGFLIRMQGVGTFVAEAKAHSALLEVHNIADEIAARGHRHSSQVLHLEARPASPEEAIALGIQPGQQLFYSQIVHYENDFPVQVENRCVNPSTAPDYMKQDFNQITPYSYLTQAAPLTEGEHIVEAVMPSPIERQLLELSEHEPCLLIRRRTWYGKAIVTAAQLLYPGPRYQLYGRFTPQGTVTS

SEQ ID NO: 78329 - protein, 456 aa, Yersinia pestis
MPVYFTKRAFLPDGWAADVQIAVDELGDIQRISTGSSSSGCQVLSGPVLPGMPNLHSHAFQRMMSGLAEVAGDPQDSFWTWRDLMYRLVQQLTPEQVGVIARQLYIEMLKGGYTQVAEFHYLHHSPDGSPYNDIGEMTAQLSQAAQDAGIGMTLLPVLYSYAGFGAQPAQQGQSRFIQDTESYLRQQQVIRRQLANQPLQNQGLCFHSLRAVELSQMQQILHVSDKQLPVHIHIAEQQKEVNDCLAWCGQRPVAWLYGHLPVDSRWCLVHATHLDTSELVMLANSQAVAGLCPTTEANLGDGIFPGVDYIHHQGRWGIGSDSHVSLDVVEELRWLEYGQRLRDQRRNRLTCERQPAVADLLYSQALAGGRQACGRQISQLAVGYRADWLVLDGDDPYIAGTRSASLLNRWLFAGGKSQIRDVYVAGKAVIVDRYHPLQQQTAQAFLAVLKACQQEV

SEQ ID NO: 78330 - protein, 428 aa, Yersinia pestis
MSEISSSKSELKKLYKSVPFTQYDVGWVILCIGMAIGSGIVFMPVQVGIKGIWVFIAAVIISYPAIYLLQNLYLRTLSESDNCTDYTSVITQYLGKNWGVGLGIAYFLMLLHGMFSYSLAVTFDSASYIKTFGLTEGLLSDSIWYGLIILTVLVAIAAQGEKILFKVSGPMVCVKFGIIVVLGVVMVPYWDFNNISAFPELFSFLRDVLLTLPFTLFSILFVQILSPMNIAYRKVESDKRIATYRAIRANRVAYIILAVAVLFFAFSFTFSISHEQAVSAFEQNISALAIAAQVIPGSIVRIMTALLNIFAILTAFLGIYLGFQEAIKGIVVNIISRFIPEENINQKVLHIGVCVGVILTLWLWVSTRFSILFFLQLGGPLFGVVSCLIPCYLVYKVPVLHKLKGPTIWFISFFGILLCLSPFFKFFE

SEQ ID NO: 78331 - protein, 334 aa, Yersinia pestis
MNGRVQPRLMLGFLLILLVILALGSANMGALSLSFRTLWNTSTNDAMWHIWLNIRLPRVLLAVVVGCALAVSGTIMQGLFRNPLADPGLLGISSGAALCVGLIIVMPFSLPPLLALYSHMVGAFIGSLAISTIIFTLSRWGHGNLARLLLAGIAINALCGAAVGVLTYISDDQQLRQFSLWSMGSLGQAQWSTLLVASSLILPTCILGLLQARQLNLLQLGDEEAHYLGVNVRQAKLRLLLLSAILIGAAVAVSGVIGFIGLVVPHLIRMRIGADHRWLLPGAALGGACLLLTADTLARTLVAPAEMPVGLLTSLLGGPYFLWLILRQREQRSG

SEQ ID NO: 78332 - protein, 345 aa, Yersinia pestis
MNASLYQQYVQAKAEHPGKYARDLATLMGISEAELTHSRVGHDAKRLQSDARALLAALESVGEVKAITRNTYAVHEQVGRYENQHLNGHAGLILNPRALDLRLFLNQWASAFTLTEETRHGVRHSIQFFDHQGDALHKVYVTEQTDMSAWEALLAQFIIPENPALQLEPLSTPEAVEPTADDATVDSEWRAMTDVHQFFQLLKRNNLTRQQAFRAVGDDLAYQVDNNSLTQLLHIAQQDQNEIMIFVGNRGCVQIFTGLIEKVTPHNEWINVFNQRFTLHLIETAIAESWITRKPTKDGFVTSLELFAADGTQLAQLYGQRTEGQPEQNQWREQIARLINKDIAA

SEQ ID NO: 78333 - protein, 563 aa, Yersinia pestis
MDRVKSLSQQSLSLLLAVYIGIFLNISVFYRRFDSFSQGIQGIKVVSAITEVIAIILFTFFVMRLISLGGRFFYRVVASLLVLISVAASYYMTFFNVVIGYGIVISVLTTDTDLSKEVIGLHFIIWMVLVSGLPLLLIWKNSLRLTLLEQCLTPGQRIKPVLLMMAVVALVWLPLRYLDKAQALDEQLKTVDLPSYGGVVAHSYLPSNWLAALGLYAYTQYNEKYDAAVLYNPAEHHTYVAPAGIDDTYVVFIIGETTRWDHMGLLGYSRDTTPRLSKEKNLAAFRGESCDTSTKLSLRCMFVREGGVEDNAQRTLKEQNVFAVMKSLGFTSELFAMQSEMWFYNNVNTNNYSFRELIASEKRNDGKPVDDMLLVDELKESLGRYPVGKHLVVLHTKGSHYLYSQRYPRSYARYQPECMGVDEFCSKQQLINAFDNSVLYTDSFIANVIDQMRDKKALVFYAADHGESISDNSHFHGTPREMAPPEQFRVPLMVWASDKFLAQPEHLAAFEQLQVEQRVGKTHRHAELFDSVLGCMGYTSPDGGIDAKNNWCQAPDRHLTPAI

SEQ ID NO: 78334 - protein, 510 aa, Yersinia pestis
MKTITLRPGQMTLADLRHIYQHPVHITLDESAYVPIQQSVDCVQAILAEQRTAYGINTGFGLLASTRIATEDLENLQRSIVLSHAAGVGEANDDAIVRLIMVLKINSLARGFSGIRLEVIQALITLVNAGVYPHIPLKGSVGASGDLAPLAHMSLLLLGEGKARYQGEWLPAHTALAQAGLQPLTLAAKEGLALLNGTQVSAAYALRGLFEAEDLYAAASVFGCLTVDAALGSRSPFDARIHAVRGQRGQIDAASTYRHLLGERSEISESHKNCDKVQDPYSLRCQPQVMGACLGQIRQAAEVLAIESNAVSDNPLVFAEQGDVLSGGNFHAEPVAMAADNLALALAEVGSLSECRISLMMDKHMSQLPPFLVENGGVNSGFMIAQVTAAALTSENKGLAFPASVDSIPTSANQEDHVSMAPRAGKRLWEMAENVRNILAIEWLAACQGLDLRKGLRTSAILEPARQLLRQHVTYYDKDRFFAPDIEVASQLIAQRHMNELMPAKLLPSL

SEQ ID NO: 78335 - protein, 563 aa, Yersinia pestis
MTTQNRFRDNEIRAPQGTQLTAKSWLTEAALRMLMNNLDPDVAENPKELVVYGGIGRAARNWECYDKIVESLINLNDDETLLIQSGKPVGIFKTHSNAPRVLIANSNLVPHWANWEHFNELDAKGLAMYGQMTAGSWIYIGSQGIVQGTYETFVEAGRQHFGGSLKGRWVLTAGLGGMGGAQPLAATLAGACSLNIECQQSRIDFRLKTRYVDEQATDLDDALARIEKYTATGVAVSIALCGNAAEILPELVRRGVRPDMVTDQTSAHDPLNGYLPKGWNWEEYRQRAQHEPALVINAAKISMAEHVEAMLAFHNMGIPTFDYGNNIRQMAHDMGVIRAFDFPGFVPAYIRPLFCRGIGPFRWVALSGNPDDIYKTDAKVKALIPDDAHLHHWLDMARERIRFQGLPARICWVGLGQRAKLGLAFNEMVRSGELSAPVVIGRDHLDSGSVASPNRETEAMQDGSDAVSDWPLLNALLNTASGATWVSLHHGGGVGMGFSQHSGMVVVCDGSDEAAERIARVLHNDPATGVMRHADAGYDIAVNCAQEQGLNLPMVAATQGKKS

SEQ ID NO: 78336 - protein, 338 aa, Yersinia pestis
MKVLVTGATSGLGRNAAQWLLEAGHEVYAIGRDQLAGEELRKLGATFIPLDLTMTTMEVCQQWLKTCDVVWHCAAKSAPWGNPQDFHQTNVVVTHKLAQAAGREGVKRFIHISSPAVYFDFRHHHDLPETYRASRFSSHYASSKYAAEQVLHECIAHYPDTTYVILRPRGLFGPHDRVIVPRLLQQLSRDRNVLRLPGGGQAQLDLTFVLNVVHAMMLATDNDGLRSGAIYNITNQEPQRLVTMLDSLLNQQLHINYTLQPVPYSLLSVVAAGMELVASMTQKEPLLTRYSVGAVYFDMTLNSERAINELGYRPRYSMAEGIVLAGEWLSAQRSGQHG

SEQ ID NO: 78337 - protein, 319 aa, Yersinia pestis
MKNLSFVAGLVILLGLMICSLFIGAGHVTFANLWSDPDMRDIFFISRVPRTLALVLAGSAMSVSGLIMQMLTQNRFVEPSIAGTTQSASLGLLLVMVFSPSASVMIKMLVATLFAMGGTVLFMMLLARMRMKSALMVPLTGIMLGAVFSAVTTFLAMEFDLLQSLGSWESGDFSGVLQGRYELLWIVGVLTLVACFIADRFTVAGMGRDFSVNVGLNYQRVMLIGMSIIAIISGVVVVVIGVLPFLGLIIPNIVSMAMGDNLRRTIPWVGLCGGGLVVLCDIIGRLISYPFEIPASVILGVIGALVFLLLIVRTKRHAG

SEQ ID NO: 78338 - protein, 81 aa, Yersinia pestis
MMRCPVCKHASHTRASRYLSEQTKEAYYQCQNIECSCTFKSIESVDKIITRPPVKEPEIIPNVILPERKVLNRYGSNARIH

SEQ ID NO: 78339 - protein, 617 aa, Yersinia pestis
MADKSVELTPVVEAPVVFSLPYFEFLVCTRRYEDAGRLLILMLEKLDTQYGRWDVFSLNKQPIQQQEYYCNRLAAAIGCLFSDPGFVISETGFLQLINFHRWIALIFAASTFGHADHVITNLNEAGNGCSHPLRFERNNFLKFCVMYLPESGIPLQPDILWQFNPQATAALFLALLSPRILPSAAGHEKRETLLAWLPEKLLTLISLEGLPERILHDVYMHCSYADMAKKHTIKRSINFHLRKTMLKNGLSDMNELPPLRSKPLMLVILEWFNSGHSIYRTHSSTLRAARDQFSTHGVAIAEATDDITRKVFDDFTEVSRTGAVETIMALAQQLRPDVIYFPSVGMFPMTVALTNLRLAPLQVMALGHPATTHSDYIDAVLVEEDYLGDIACFSEKVVSLPKDCLPYVPPANITQPEPIQQFVQREAVHIAVCASAMKINPRFLAACAEIALRSPLPIIFHFLVGFCWGITHRVMEKAVNEMVTSAKVYEHLNYQNYLQVINQCDLFINPFPFGNTNGIVDTVRQGLPGVCLSGEEVHEHIDEGLFRRLGLAEELITHNVEQYITATVRLITDTNWRNGLRRQLLQTQPDNVLFTGKPEQFGQIVRALLDNGHQDVN

SEQ ID NO: 78340 - protein, 397 aa, Yersinia pestis
MPLSDRQIRRAKPQEKAYTLSDGQGLSLLIEPNGSKGWRFRYRFAGKARLMSLGTYDLVSLAEARSKRDVARKQVADGTDPAEVKKAEKLAQRLSSENSFEAISREWHKAKADRWSLGYREEIMSTFEADIFPYIGKRPIAEITPLELLDVLQRIEKRGALEKTRKVRQRCGEVFRYAIITGRAEYNPAPDLASALSTPKKQHYPFLSAEEMPYFIRDLEGYTGSIITKNAAKILMLTGVRTKEMRFATWQEIDLEGGLWEIPAERMKMRRPHIVPLSTQVIALFKQLLPITGHYPYIFIGLNDRKKPISKETVNQVIELLGYKGRATGHGFRHTMSTILHEQGYDSAWIELQLAHVDKNSIRGTYNHAQYLEKRREMLQWYADLIFNFFRKNYERI

SEQ ID NO: 78341 - protein, 345 aa, Yersinia pestis
MESTHIGFPIETVAVFILLSVGAICIDLFMHRHDKPISLKSAALWSLFWVAIAFVFAGFLYLHHGAEAASLFVTGYALEKVLSIDNLFVMMAIFSWFAVPDRLRYRVLYWGIIGAIVFRGIFVAIGTGLLMLGPWVEVVFAIVVAWTAVMMLRKGDDDDAIEDYSQHIAYRLVKRFFPIWPKLRGNAFILSQKEVDAELAKPENADVQVGRKGGVARYATPLMLCLAVVELSDVMFAFDSVPAVIAVSREPLIVYSAMMFAILGLRTLYFVLEALKQYLVHLEKAVIVLLFFIAAKLGLNASDHFFNHGYDISANVSLFVVIGVLAIGIVASFLFPEKDSKEGQH

SEQ ID NO: 78342 - protein, 331 aa, Yersinia pestis
MKFKNILLSACAALVMFSQPGFSKEIKIGMAIDDLRLERWQKDRDIFVNKAESLGAKVFVQSANGNEETQMAQIENMINRGVDVLVIIPYNGQVLSNVIAEAKREGIKVLAYDRMINNADIDFYISFDNEKVGELQAKNLVERVPQGNYFLMGGSPVDNNAKLFRQGQMTVLNPLIKDGKIKIVGDQWVDAWLPENALKIMENALTANNNNIDAVVASNDATAGGAIQALAAQGLAGKVAISGQDADLAAIKRIVAGTQTMTVYKPISKLANDAAEIAVTLGNGEQPKANSTLNNGMKDVPAYLLTPIQVDKNNIDSTIIADGFHKKADIY

SEQ ID NO: 78343 - protein, 439 aa, Yersinia pestis
MQSYFNELEQVRYEGSQSTNPLAFHHYNPDEMILGKRMADHLRFAACYWHTFCWGGADMFGANAFDRPWQQPGDALALAKRKAEVAFEFFHKLNVPYYCFHDVDVSPEGASLQEYLNNFAVMTDVLAEKQAASGVKLLWGTANCFTHPRYGAGAATNPDPEVFSWAATQVFTAMNATRQLGGENYVLWGGREGYETLLNTDLRQEREQIGRFMQMVVEHKHKTGFQGTLLIEPKPQEPTKHQYDYDVATVYGFLKQFGLEKEIKVNIEANHATLAGHSFHHEIASAIALGIFGSVDANRGDPQLGWDTDQFPNSVEENTLVMFEILKAGGFTTGGLNFDAKVRRQSTDKYDLFYGHIGAMDTMALALKFAAKMIEDGQLDQIVAKRYAGWNSELGQQILQGKMSLEELSRYASQHNLNPQHQSGHQELLENKVNRYLFG

SEQ ID NO: 78344 - protein, 185 aa, Yersinia pestis
MSNVKKSTFIIALATLSVIYQALAADAGNGRIKFTGTVINAPCSIALDSTDINVDLGQVANRVLETGNKYSQSVRYNINLQDCSLTAQGSGGATYPALSKVNVTFSGIADAAAPALLANTGSAKGVGVRLIGTDDALLKVGDTSPDINLTSGPNQIVFSARIEATSAPVTTGTVVSQATYALNYK

SEQ ID NO: 78345 - protein, 826 aa, Yersinia pestis
MRIIKKIPIAMTTSLIMLSGAVSAIDFNTDAMDANDKQNIDLSHFTNVGYIMPGEYRLEINVNNHRIPEQVIAFYARDDEPNSSEVCLPEAVVEQFGLKPDVLQKITFWHEGQCADLRELAGLTTEVDLATSTLAINVPQDWMEYSDSNWVPSSQWDEGIPGFLLDYNVNSLFSKPKESGSTRNISLNGTSGLNAGPWRLRGDYQGNYSHNSGEQNSSTSTFDWSRIYMYRAIKSLAATLSVGENYFASSLFDTFRYAGASLSSDERMLPPNLRGYAPEVSGIARTNAKVTVSQQGRILYQTTVASGPFRIQELSDSVSGRLDVSVEEQDGTVQTFQVETAAVPYLTRPGAIRYKTSVGQPSTLNHGTEGPVFASGEFSWGVSNRWSLFGGAIGSGDYNAVSVGVGRDLYAFGAISTDITQTRASGLPNQETQSGKSLRVRYAKRFDELNSDISLAGNRFFEREFMSMNQYLGTRYFDNDLGRNKEMYTVTASKNFPDIQTNINFSYSYQNYWDQPTSNSYSATVSHAFDAFSLKDMTVNLSASRSKNNGVNDDVLYLSFSVPLGNQQTLSYSGQHNGQGNNQTVNYSNSSAIDSSYRLSAGVNNSNDNGARGQFSGFYIHRSSIAETSLNVAYAQDDFTSTGVSMRGGATVTAKGAALHGPGMSGGTRLMVNTDDIAGVPLEERNIRSNRFGIAVLNNINSYYRTDTRIDINQLADDVEVKQSAVEFALTEGAIGYRRFAMMKGEKVLATISLTDSSHPPFGSLVISAKGQELGIVSDDGFTYLSGVEPGETLDVVWSGAKQCQVAIPAVIQPQAQILLPCISVN

SEQ ID NO: 78346 - protein, 239 aa, Yersinia pestis
MKKLSLIALTSTVVFTSYTANAAIALDRTRIIYNGQDKSISLNISNENKTLPYLAQAWIENEQQQKVTTPLVATPPVQRVEAGKKSAVRISATPEALKLPQDRESLFYFNLREIPPRSEKSNVMQIALQTKIKLFYRPEGITPATGQIWQEQLVLHKTAQGFRLENPTPYYITVVGLAEKGKSSADSNFQPLMVAPKSSAELKSASFTAPVLTYINDYGGRPELSFSCSGSTCRAAKAI

SEQ ID NO: 78347 - protein, 368 aa, Yersinia pestis
MKKNIFLTLRSERYKAGLLLLLLLLLCTTSKPSFAALQVNSCSLAVSGAGGETPFVIKALPVTLTNGFVLGSMNFSVVTTFTKTGTTADYLYLGGWSMLAGGAVMPVSTGVPGVKMSVNVSDALFGGYEWGNTEKATQSLFVPGTKITIANRVTVQLIVTDASVYQGGVINWFNVARSFALVSGNAQVWSTKSVATGGSRCGDMVTFNIGSTNIVLPPPTVATCDLGATDIVVALDPIDTSSLQTQGDRAGGQAFSIPLGSCAKDAKPYITFTDSSNKANRTNILSLSPSSTATGVGLVLEKSDGNLVTFGAENASVSASNVGQFLIGTSTAAGGSMPLNLTARYIRAEGVLKSGNVKADAIFTVAYP

SEQ ID NO: 78348 - protein, 337 aa, Yersinia pestis
MGLILSLSGCEPAEETNFHPFPIDENHSTSSPWSRTVDTVKGPVTLTHKPARIVSTSITITGTLLAINAPIIASSATEPNTTLADNKGFFTQWSDIARARHLIPMYQTEPNIKAVAKMRPDLIIISATGDDSTLELYDQLSAIAPTLVINYDDKSWQELTLQLGQATGHEGDAEQVIDKFARRLNEVKQKITLPPQPVSAFVYQEVSGSAKLWTENSAQGRLLLELGFTLANVPDTLKDNTHTEHRKDIIQLGGDELAQGLNGKTILLFSGVHSAIDALKSNKFLTNLPAIQHDNVYAAGYDTFRLDYYSANNLLTRIESMFKGKKDSEPTYHESRT

SEQ ID NO: 78349 - protein, 825 aa, Yersinia pestis
MSGWRKIYYKLLNLPLKLLVKSKVIPADPVSELGLDPSRPILYVLPYNSKADLLTLRAQCLAQDLPDPLIPLEIDGVQLPSHVFIENGPRVFRYYVPKQESVKLFHDYLDLHRNNPALDIQMLPVSVMFGRSPGREGHGTPHLRVLNGVQKFFAVLWLGRDSFVRFSTTVSLRRMASEHGTDKTIAHKLARVARMHFSRQRLAAVGPSLPARQDLFKKLLASKAIEKAVADEARSKKISHEKAQQNAITLMEEIAANFSYEAVRLSDRVLSWTWNRLYQGINVHNAERVRQLAQDGHEIVYVPCHRSHMDYLLLSYVLYHQGLVPPHIAAGINLNFWPAGPIFRRLGAFFIRRTFKGNKLYSTVFREYLGELFTRGYSVEYFVEGGRSRTGRLLEPKTGTLSMTIQAMLRGGTRPITLVPIYIGYEHVMEVGTYAKELRGAIKEKENLLQMLRGLRKLRNLGQGYVNFGEPLPLTTYLNTHVPQWRDAIDPIEAQRPSWLTPAVNDLANQIMVRINNAAAANAMNLCSTALLASRQRSLTREQLLEQLDCYLQLMRNAPYAKDTTVPDKTPEELLNHALNMNKFEVEKDTIGDIIILPREQAVLMTYYRNNIQHLLILPSLIASMVMYHRRITRTELLHKISMIYPMLKAELFLHYSKEQLPETLDTLIDELARQQLICDKGSELVLNPARIRPLQLLAAGVRETLQRYAITLSLLSATPSINRGALEKESRIMAQRLSVLHGINAPEFFDKAVFSTLVATLREEGYISDSGDAIQEHTLEVYNMLSALMTPEVKLTIESVSMPAETSNQPEAPETPEPEGKTES

SEQ ID NO: 78350 - protein, 123 aa, Yersinia pestis
MANQSTGLTRIYKAAGYTVKGLTAAWNNEAAFRQESVAAVIAIILAFWLDVGAIARILLICSVVLVLIVEVINSAIEAVVDRIGSEFHALSGRAKDMGSAAVFLTILMALFVWITVLWQHVAR

SEQ ID NO: 78351 - protein, 465 aa, Yersinia pestis
MKPASSLTISEIQQALHKGELSAQAIAQQTLDAITVANPLINAYTHITADRMLSEACRLDTLRAKGQPLPALAAVPYAVKNLFDVAGETTLSGASLFCDQAPAKQDAWAISCLSRQGAMLSGMLNMDAYAYGFTTENSHYGATHNPHDLNRIAGGSSGGSAAAVAAGLVHFSLGSDTNGSIRVPSSLCGIFGLKPTFGRLSRRGTHPFVASLDHIGPMARCTQDLAVVYDVMQGIDTQDNFQADQPVTPCQNLLTRGQQGLRSAVLGGYFHQWSDDDAKAAVLAVAKALEANAEVEMPQSDLARSAAFIISASEGGNQYLPALRKSPQRFEPLSRERLLAGAMLPATWYVQAQRFRHHFRQHILPLFEHWDILIAPATPCSATLIGQDTMRINDMDLPIRASMGILTQPISFLGLPVVSVPLKTTRGLPIGIQLIAPPWREDLCLRAAYALEQQGLVSAPVSTVI

SEQ ID NO: 78352 - protein, 170 aa, Yersinia pestis
MESSFSPIEQMLNSRAKRQKDFPYQEILLTRLSMHMHSKLLENRNKMLKAQGINETLFMALITLDAQESRSIQPSELSAALGSSRTNATRIADELEKKGWIERRESHNDRRCLHLHLTEAGIEFLHQLLPPQHKCLHFLWSTLTEQEQQQLEMLTRKLLTRLDQMEISEQ

SEQ ID NO: 78353 - protein, 345 aa, Yersinia pestis
MHEAQTFSSTPATKPQYPLQRFSVAPMLDWTDRHCRYFHRLLTKQALLYTEMVTTGAIIHGKADYLAYSEQDHPVALQLGGSDPQALAHCAKLAEQRGYNEINLNVGCPSDRVQNGRFGACLMGEADLVADCIKAMRDAVAIPVTVKTRIGIDQLDSYEFLCEFVQTVAERGECEIFTIHARKAWLSGLSPKENREVPPLDYERVYQLKRDFPALTIAINGGVKTLAEAKEHLKHLDGVMMGREAYQNPGILTQVDRELFDPNAPVVDSVKAIEALYPYIEQELSQGAYLGHITRHILGIFQGIPGARQWRRHLSENAHKPGAGVSVVEEALALVSPSYYESVGG

SEQ ID NO: 78354 - protein, 468 aa, Yersinia pestis
MAAKKPTNKMTEPRDRQMEGLKLPPHSLEAEQSVLGGLMLDNERWDNVSERVASKDFFSRPHRRIFTEMQRLLENSKPIDLITLSESLEQKGDLDSVGGFAYLAELSKNTPSAANIGAYADIVRERAVVREMISVANEIADAGYDPQGRSSEDLLDLAESKVFQIAESRASKDEGPKSVDRILEDTVARIEQLYQRPHDGVTGVSTGFTDLDKKTAGLQKSDLIIVAARPSMGKTTFAMNLCENAAMMQDKPVLIFSLEMPGDQIMMRMLASLSHVDQTRIRTGQLDDEDWARISSTMGILMEKRNMYIDDSSGLTPTEVRSRARRIFREHGGLSLIMIDYLQLMRVPSLSDNRTLEIAEISRSLKALAKELQVPVVALSQLNRSLEQRADKRPVNSDLRESGSIEQDADLIMFIYRDEVYHENSDEKGIAQIILGKQRNGPIGSVRLKFNGQWSRFDNYAGPQYDDE

SEQ ID NO: 78355 - protein, 359 aa, Yersinia pestis
MKAATAVIDRHALRHNLQQIRRLAPQSRLVAVVKANAYGHGLLAAAHTLQDADCYGVARISEALMLRAGGIVKPILLLEGFFDAEDLPVLVANHIETAVHSLEQLVALEAATLSAPINVWMKLDTGMHRLGVRPDQAEAFYQRLSACRNVIQPVNIMSHFSRADEPEVAATQQQLACFDAFAAGKPGKQSIAASGGILRWPQAHRDWVRPGIVLYGVSPFDAPYGRDFGLLPAMTLKSSLIAVREHKAGESVGYGGTWVSERDTRLGVIAIGYGDGYPRSAPSGTPVWLNGREVSIVGRVSMDMISIDLGPESTDKVGDEALMWGAELPVERVAACTGISAYELITNLTSRVAMEYLGE

SEQ ID NO: 78356 - protein, 947 aa, Yersinia pestis
MDNIEVRGARTHNLKNINLIIPRDKLIVVTGLSGSGKSSLAFDTLYAEGQRRYVESLSAYARQFLSLMEKPDVDHIEGLSPAISIEQKSTSHNPRSTVGTITEIHDYLRLLFARVGEPRCPDHDVPLAAQTVSQMVDNVISQPEGRRLMLLAPVVKDRKGEHTKILENLAAQGYIRARIDGEVCDLSDPPKLELQKKHTIEVVVDRFKVREDLAQRLAESFETALALSGGTAVVADMDDPHVEELLFSANFACPICGYSMRELEPRLFSFNNPAGACPTCDGLGVQQFFDPDRVLQNPELSLAGGAIRGWDRRNFYYFQMLRSLAEHYKFDIEAPFNSLDSAVQQAVLYGSGKDTIEFKYINDRGDTTVRRHPFEGVLHNMERRYKETESSAVREELAKFISNRSCASCSGTRLRREARYVFVENTTLPEISELSIGHALSFFQNMKLSGQRAQIAEKILKEIGDRLKFLVNVGLNYLSLSRSAETLSGGEAQRIRLASQIGAGLVGVMYVLDEPSIGLHQRDNERLLETLIHLRNLGNTVIVVEHDEDAIRAADHVIDIGPGAGVHGGEVVAEGTVDDIMAAPASLTGQFLSGKRSIAIPEKRVSADPSKVLKLIGATGNNLKDVTLTLPVGLFSCITGVSGSGKSTLINDTLYSIAQRQLNGATITEPAPYREIQGLEHFDKVIDIDQSPIGRTPRSNPATYTGIFTPIRELFAGVPESRTRGYTPGRFSFNVKGGRCEACQGDGVIKVEMHFLPDIYVPCDHCKGKRYNRETLEVKYKGKSIHEVLAMTIEEAREFFDAVPALARKLQTLIDVGLSYICLGQSATTLSGGEAQRVKLSRELSKRGTGQTLYILDEPTTGLHFADIQQLLAVLHQLRDQGNTIVVIEHNLDVIKTADWIVDLGPEGGSGGGEILVSGTPETVAECAASHTARFLKPMLQRKPQTV

SEQ ID NO: 78357 - protein, 182 aa, Yersinia pestis
MASRGVNKVILVGNLGQDPEVRYMPNGGAVANITLATSESWRDKQTGEQKEKTEWHRVVLFGKLAEVAGEYLRKGSQVYIEGALQTRKWQDQSGQERYTTEVVVNVGGTMQMLGGRQGGGAPAGGGAAPQDGGAQGGWGQPQQPQGGNQFSGGQASRPAQPAPAAPQGGNEPPMDFDDDIPF

SEQ ID NO: 78358 - protein, 857 aa, Yersinia pestis
MRLDRLTSKFQLALADAQSLALGRDNQFIEPLHLMSALLNQDGGTVRPLLTSAGINVARLRSDIEQALGRLPQVEGTGGDVQPSNELVRVLNLCDKLAQKRSDKFISSELFVLAVLEDRGTLTDMLKAAGATVAIIDKAIETMRGGDKVDDQGAEDQRQALKKFTIDLTERAEQGKLDPVIGRDEEIRRTIQVLQRRTKNNPVLIGEPGVGKTAIVEGLAQRIVNGEVPEGLKHKRVLSLDMGSLIAGAKYRGEFEERLKGVLNDLSKQEGSVILFIDELHTMVGAGKGDGAMDAGNMLKPALARGELHCVGATTLDEYRQYIEKDAALERRFQKVYVAEPTVEDTIAILRGLKERYELHHHVQITDPAIVAAATLSHRYISDRQLPDKAIDLIDEAGSSIRMQMDSKPESLDRLERRIIQLKLEQQALKKESDDASKKRLEMLNTELEQKEREYSELEEEWKAEKASLTGTQNIKTELEQAKITLEQARRVGDLARMSELQYGTIPELEKQLAAATALEGKTMKLLRNRVTEIEVAEVLARWTGIPVSRMLKSERDKLLRMEQDLHQRVIGQDEAVEAVSNAIRRSRAGLSDPNRPIGSFLFLGPTGVGKTELCKALATFLFDSDDAMVRIDMSEFMEKHSVSRLVGAPPGYVGYEEGGYLTEAVRRRPYSVILLDEVEKAHPDVFNILLQVLDDGRLTDGQGRTVDFRNTVVIMTSNLGSDLIQEHFGQMNYSEMKTVVMDVVSHHFRPEFINRIDEVVVFHPLGRAHLASIANIQLERLYKRLEERGYEVKITQPALEFLGEAGFDPVYGARPLKRAIQQEIENPLAQQILSGKLIPGIPVTLDVENGHIIAKQ

SEQ ID NO: 78359 - protein, 303 aa, Yersinia pestis
MRNHASGGATTIIKRANRKKHHVRHSGAWKVAFADFTLAMMALFMVLWIVGVVSEEERQEIVAQLNGKTIFAQQSFISIPSKSKSGGGKLSNSIDGKEQAKETKSNLAIEVPEPEQSLEEVVDKSRHEMEELSRIIMQITSAYNAQSNLQMEVVPQGLRILIQDDQQRDMFQRSSAVLTPFFSRLLGELAPAFNEMDNKIIITGHTDASRYRDQLLYNNWNLSGERALMAHKALVNGGLDEGRVLQINAMADQMLLDPTDPLAAKNRRIEIMVLTKTASDTLYQFFGHHGENVVKPAAEKAEK

SEQ ID NO: 78360 - protein, 1438 aa, Yersinia pestis
MAMPAVKHFDPVIGLDVHTVIIPPSPAPIPIPHPHVGFVLDLRECVNGVKSVVGSIVFSFAAEAAADVMEDNPELLAAGMALVSKAGSALEAAANNPVVKTGLALKDAKDQLSGLKAGIIDTLGGNIGGGGGSNRPVKVNGTLRSTVGTHTFHIPGLHFPLGTLFAPLIPSKDSESFMGSKTVMANGDPLSYMALPAMSCWFVGLPSTPKNAAHTQRKSLSLPTSVMLPIPMGRPVVVGGMPVLNLLALMMGLFKIFRGSKLAKKLAEKLGLKSGFLKCTILDAEPVNSITGEVVVEQNDFVVEGRFPLVWDRYYGSQKAVTGVIGQRWQCPADIRLEVLVDQGELGVVARFPDHETVFSLMPIEQGWDERVYDWQQGHALYRSGNQLVLRTRHEEEYFFTLPNDWESTVIPFTAADRLTLPILRMADRYGNGWQFKRQGNSLLLALIELTQGLLSGREVHVIQDENAPISGMLNDFVLVNKTNGERRFLVGYRHDGEGNLIATLDADNHPYQFEYIADSQMVRHTDRNGLSFYYRYQRHSDGLDRVEHAWGDGGLFDYRFHYDRVYQETQITDSLGHTTLLRYDERGLPFARVTPLGGVYSYQYDAQCRTIAEIDPAGNTHGWMYDQYANLTEETFADRSSVKTEYGDDHKPVRITDPGGRFWRQSWDAQGKVISQTTPGKIATHFTYDDLGQLVAVVDASQQRTELAYDAWGFLRVITDARGNATSFKHDFCGNLLKKVAANGDITRYQYDKKQRLTGCTLPDARTIRCEYDREDNLLLYNENGSRITRFGYFGQGRLQSRTDPDGSLTEYLYDTEEQLIGVKNQRGKTWQLKRNAEGRLIEEVDYWGQSRRYQYNAVGHLTGSHDPLGQILAVTCDKLGRITEKNIAGDEQAWERYEYNVQGQLIGAVNPAVTVTRRYNQDGQLAQEIQQQPQVSATVEYGYNAAGQQVEQRHLLQYADEDDIQVQQRIRYGYDVLGQCISQQIDDHRPMAFSYDKIGRLTEQRLTPSLSHHLRYSAAGQLAGYQTRRKGMVWSETDYFYDQHGNLTQREDSRQGSERYHYDVLGQIVGYQDPLGTLHRYRYDACGDRFSTVADNAEGRHTQQDNGTAYQLDKAGQLVSRTDRFSQLALRWNTFGRLAGIKNEHHDHAYTYDALGRRVGKRHLQRPTKLLDGLRVIDKETPSRGEPVWQDETWFMWDGDVMVGELQREVAPRVVTPETWDKPDGIVYSGQFYVYQPDSFEPRAMQRYQQIAEAEDGEIAPLGEEQIYFYQNDPNGMPIRLQDGEGEVVWEAQFTPFGQLSVTGTSQLRQPLRMQGQYYDTESGLHYNRYRYYDPACGVFISQDPIGLKGGLNPYQFAVNTLGWVDPLGLWKKRRNNGQFAKKPGRKKTNLVIQHMEIAMILINQQKGILCVIVISVMLRNMVKQLKVRRDTLRSI

SEQ ID NO: 78361 - protein, 741 aa, Yersinia pestis
MFADSNKAKVKERSAVNSASTGTAAISAAINAPSGLQFKLTAAGLPPQTFAVVDFSLNEAFSSPFVLHVGLASADPAVDFSAVLDEDATLSIWREGILQRSITGMIASFEQGNTGFHQTRYSMVIRPALWRTSLRRNSRIFQLESVEAIISTLLKENGINDFAFGFRHSHPAREFCVQYQESDFDFIQRLTAEEGIFYYFEFSTGKNTVVYADDVGSLPKGASLPYNPNVAAQAQELSITTFTRSAQVRPAMVQLKDYTFKNPKWAAEFSEQARELQNQRPDYEHFDFPGRFKDEQHGKDFTRYRLEALRNDANKGQGESNEFTLQPGQLFSLSAHPRDDLNHAWQIVSIQHTGKQMQALEQESGDQGTVLFNQFSFIPPTQTWRPTPLPKPVTDGPQIAMVVGPPSEEIYCDEYGRIRLQFQWDRYGQSNDQSSCWIRVTQPWAGQGWGMLAIPRIGQEVVVDFLHGDPDQPIVTGRTYHANNLPPSALPGAKTQMALQSKTHKGEGYNELRFEDQDGKQELSMRAQRDMNTTVLNDRSTTVSGNHTETVTKDQAVTVSGNQTMDITQDQTITVTGTQRIDVTQDRIIDVTAEQQTTVKADDRLLISGKQKTKIDLDQEYEVVGSQKKTIGANQTLKVGGYQKNTLEGYKKSKIGGDNTTTVGGHDKLTVGDTITITAGTSITLQCGASSIVMDEAGNIKITGVNITSAASTTHTIKAKTVTSCGDTENIVEGGILKLNP

SEQ ID NO: 78362 - protein, 264 aa, Yersinia pestis
MKQYLDLMKKVLEEGTPKADRTGTGTLSIFGHQMRFNLQDGFPLVTTKRCHLRSIIHELLWFLNGDTNIAYLKENNVSIWDEWADENGDLGPIYGKQWRAWGAADGRKIDQLSNVVNQLKQDPDSRRIIVSAWNVGELDQMALAPCHAFFQFYVADGKLSCQLYQRSCDVFLGLPFNIASYALLVHMMAQQCDLAVGDFVWTGGDTHLYSNHIDQAHLQLSREPRVLPKLVIKRKPDSLFDYHFDDFDIEGYDPHPGIKAPIAI

SEQ ID NO: 78363 - protein, 228 aa, Yersinia pestis
MSVYSLPPAPPSDEHQLFQRAQALSGFTLGELATRAQWVIPADLKRVKGWVGMLLEFYLGASAGSKPEQDFADIGIELKTIPISAQGKPLETTFVCVAPLTGNSGVTWESSHVRHKLARVLWVPVEGERHIPLAERRVGAPLLWSPNVEEEELLRRDWEELMDLIVLGKVESITARHGQVLQLRPKAANSRALTEAIGEFGQPIMTLPRGFYLKKTLTAPMLARHFLL

SEQ ID NO: 78364 - protein, 386 aa, Yersinia pestis
MPVALLALALCAFAIGTTEFVIMGLLPQVAGDLHISIPTAGWLISGYALGVAIGAPIMAVLTAKLPRKKTLLLLMVIFIIGNLMCALAYSYDFLMFARVITALCHGAFFGIGAVVAANLVAPNRRASAVALMFTGLTLANVLGVPLGTALGQAFGWRSTFWVVSVIGLFSLAALYSKLPSSSEEAPTELRKEIAALRGGGIWLSLLMTVFFAAAMFALFTYIAPILTEVTQVSEHGVSWTLLLMGVGLTLGNIVGGRLADWRLSVSLTMTFLLIAVFSALFSWTSYSLLAAEVTLFLWSAAAFSAVPALQINVVAYGKKAPNLVSTLNIAAFNVGNALGAWVGGVVIAKGLGLTAVPLAAAALAVMGLLLCLFTFSRARTIGNKMA

SEQ ID NO: 78365 - protein, 640 aa, Yersinia pestis
MYISGKGIKSIHGMIFLFTLIMPLDIISANFSVSFKDVDIKEFINSVSKNINKTIIIDPTVQGLISIRSYENLDKDTYYQLFLNVLDVYGYAAIEMPHNVLKVISSKRAKGVVAPLPKEGVTFDGDELINRVIPLRYISAKKITPLLRQLNDNTESGSIINYDPSNILLITGRAAVVNHLHSIVTDLDQAGDNEIELYKLNYAIAADVVKIVNEAINPINNLKQEVSIVGKVIADERTNSILISGDTYIRKKSILMIKKLDKRQSSDGNTKVVYMKYAQASKLLDVLNGISEGFHNEKKTKQSNQWNQRPVAIKAYDQTNALVITADPDMMLALGEVIEKLDIRRAQVLVEAIIVETQNGEGINLGVKWENKRSDDINFIKNSDGLLNNNGWGIATTITGLTAGFYKGNWDVLLSALSTNTNNNILATPSIVTLDNMEAEFNVGQEVPVLISTQTTTTDKVYNSISRQSIGVMLKVKPQINKGDSVLLEIRQEVSSIADSSTVNTHNLGSVFNKRVVNNAVLVKSGETVVVGGLLDKKSSTIVNKVPFLGDLPLIGWLFRQTKEKVEKSNLILFIKPTILRESDDYSVVTSKEYNKYKKDNMNGYTLADDIVLSDKKYLSVIPSIRKDINNFYTLLDSEL

SEQ ID NO: 78366 - protein, 432 aa, Yersinia pestis
MHPLEKLVQRHKAGEQIGIYSVCSAHPLVIEAALEQALENDSELLIEATSNQVDQFGGYTGMTPVDFRDYVFAKADALHFPLEKLILGGDHLGPNRWQHLPANEAMAHADDLIAAYVAAGFKKIHLDCSMSCADDPVPLSDEIVAERAARLAAIAEATEYQHFNTHTAVYVIGTEVPIPGGATEELDEIEVTSPEAARKTIECHQKAFEKSGVAECWPRVIGLVVQPGVEFDHTGVIDFCPEKAHELSKVMDEYDYQVFEAHSTDYQTDDAYRALVKGHFAILKVGPALTFALREALFSLCHIEEELFPAEQCSRLRQVMEDVMLKSPEYWKRYYLGDTEQVRLARVYSFSDRMRYYWPMEAVQAAQEKLFANLNSAPIPLPLLSQYMPRQFTAVREGTLSFEATALVKQQIKNTLIGYVNACHLFNGNTSK

SEQ ID NO: 78367 - protein, 271 aa, Yersinia pestis
MAETLLEVRNLSKTFRYRTGLFRRQHVEAVKSVSFTLREGQTLAVIGENGSGKSTLAKMLSGMIEPTAGELLIDDHHLAYGDYAYRSQRIRMIFQDPSTSLNPRQRIGQLLDAPLKLNTELDAPAREQRIYQTLRQVGLLPDHANYYPHMLASGQKQRVALARALILQPKVIIADEALAALDMSMRSQIINLMLELQEKHGISYIYVTQHLGMMKHISDQVIVMHEGEVVERGSTAEVLAAPLHDLTKRLISSHFGEALTADAWRRDTSNF

SEQ ID NO: 78368 - protein, 426 aa, Yersinia pestis
MVQFRRRNNAHWYHETQCSGSLEHCSGSPVNISTTVNVPTTVNNENPPVDIRPRDPSESDNMSTGSNITEQSIITEQGIFLLGVTENIAPTLQDTLYHEQPILTASDAMYQALFPTIIEINHTNTFSLYDRLSTALTVAQVTGIQRLCSHYALRLAPLPSPDASRESNIRLTQITQYARQLASQPTLIDRHALAQLHDVGLTDSDIIILSQIIGYVGYQARVVAGISALAGYPTVMLPGFPRMEDAAPSPLPDVMPNWQGWLPSHAANDDQPDKEPDETASTLTELLGHHQQSLLAYHAITTHQPNSPQLQRDWLELVALVSARINGSLYCQARHRQHLQQLTEPPLLVTELLKGIDHALFLLPEQQIPHQLISVTAELTRAPERFNHQHVKRLQTLGVSDTQVMRIIFSIAITGWTNRLRHTLGK

SEQ ID NO: 78369 - protein, 424 aa, Yersinia pestis
MTSSNLIKQLQERGLVAQVTDEDALAERLAQGPISLYCGFDPTADSLHLGHLVPLLCLKRFQLAGHRPVALVGGATGMIGDPSFKASERKLNTEDTVNEWVEKIRHQVSPFLDFDCGENSAIAANNYDWFGGMNVLTFLRDIGKHFSVNQMINKEAVKQRLNRDDSGISFTEFSYNLLQAYDFACLNKNHGVALQIGGSDQWGNITSGIDLTRRLHQQQVYGLTVPLITKADGTKFGKTEGGAVWLDPKKTSPYKFYQFWINTADADVYRFLKFFTFMSLEEINALEEEDKNSGKAPRAQYVLAENVTGMVHGPEGLAAAKRITDSLFSGDLHDMTEADFAQLAQDGMPTVELNRDADLQQALVNAELVPSRGQARTMIGSNAVAINGEKQADPEYVFTDADRLFGRYTLLRRGKKHYCLISWL

SEQ ID NO: 78370 - protein, 199 aa, Yersinia pestis
MNKIQHTHVDTREHLLATGERLSLRLGFNGMGLSLLLTTAGIPKGSFYHYFRSKEVFGEAMLQRYFDRYDAEMESLLAGSQGDKRHHLLHYFAQSIANYCGSECHNACLAVKLSAEVSDLSEPMRHALDIGTARVIGRLQDAIEAGIDEGSLRTVLSPAATAETLYALWLGASLRAKVKHSVAPLTCALGSIELILQPA

SEQ ID NO: 78371 - protein, 135 aa, Yersinia pestis
MRLLHTMLRVGDLQRSIDFYTKVLGMRLLRTSENTEYKYSLAFVGYSDESKGSVIELTYNWGVDQYDMGTAFGHLALGVDDVAATCDQIRQAGGKVTREAGPVKGGNTIIAFVEDPDGYKIELIENKSAGDCLGN

SEQ ID NO: 78372 - protein, 282 aa, Yersinia pestis
MRSQRELTSPMTPLENPGDISDKPRLTTQKLSLGYGQQLIINKLSLSIKNGAFSVIIGPNGCGKSTLLRALSRSLLPQNGSIRLDQQDIQHYKAKVFARQLSLLSQGASISETLTVFDLVSRGRYAHQSFFHQWSTEDERIVKAAISAVNLESLVQQRVSELSGGQRQRAWFAMTLAQHTPIVLLDEPTTYLDIAHQIEMLDLCQELQQQGKTLVLVLHDINQALRYATHLIMLKEGQIYAEGLPESIVTEDSIAAVFGLRCRIITDPESGKPLVIPRRQSR

SEQ ID NO: 78373 - protein, 341 aa, Yersinia pestis
MATIKDVAKHAGVSTTTVSHVINKTRFVAENTKAAVWAAIKELHYSPSAVARSLKVNHTKSIGLLATSSEAPYFAEVIEAVENSCYSKGYTLILCNSHNNLDKQKAYLAMLAQKRVDGLLVMCSEYPDQLLGMLEDYRNIPMVVMDWGTARGDFTDSIIDNAFEGGYLAGRYLIERGHRDIGAIPGQLARNTGGGRHQGFLKALEEANIPVREEWIVQGDFEPESGYKAMHQILTQKHRPTAVFCGGDIMAMGAICAADELGLRVPQDISVIGYDNVRNARYFSPALTTIHQPKERLGETAFAMLLDRIVSKREDPQTIEVHPKLVERRSVADGPFRDYRR

SEQ ID NO: 78374 - protein, 753 aa, Yersinia pestis
MRILEKNHGKSRVRFNCTHPIKPAAWVLAANVSLLGCAYAATDENNSQKKERENNPANTTITVTASPLRHAGVTEDSGSYNTSSMSTATGLNISARETPQSVSVLTKQRMRDQNLNSVESAVNNITGISVRQFDSDRFGFTSRGMAVNNVMRDGVATFYDTRFNYGDNTLDTDMFDRIEVVRGAAGLMAGPGNPSAVINLVRKRPTQDFRGSVSAGVGSWEKWRTALDISGPLNSEGSVRGRFVTAYEDKNSFVNRYDQSKNPFYGILEIDVTPNTLFTFGADTQRTLTRGGMFGGLPLFNSAGGRTNYAQSATTASDWASAETRTQTLFSSLQHNFDNGWNIKGTFTFDNDKLRQDVMWPTGYPDPQTNIGMRPGSLSLIDGARRQQNYDIQVNGQYSLFGRQHQLGLGWNRQRQNIDNDYYLATCNATRTCPDLGDFTQPGWQYPKPVWSDKRAYGSKGRSDQSSQYVVTQLSLIDPLTLILGGRLTTWETRGDNFGTPQNARYKNEFVPYSGLTYDINRDLSVYTSYTEIFNPENRRDRNNTLLAPVSGQNYEAGLKGVAFDNSLDYSLAVFEIRQNNMPVPDTTAPRLPDNSQPYFAVDGTKTRGFEAEVSGKMTEDWNISAGYTQYNVKLPSSNTQTPVTPVTPRKVLKLFTTYTLPGQLSDLTLGGGVNWQSQIARNLSSPIGIQQIGQGSFAIYSLMSRYQFTPQLSLTVNLDNLFNQHYYTQIGQYNQYLLGAPRNVDATVRYTF

SEQ ID NO: 78375 - protein, 296 aa, Yersinia pestis
MKCLKAVIPVAGLGTRMLPATKAIPKEMLPVVDKPLIQYIVDECVAAGVKEIVLVSHSSKNAIENHFDTSFELEAALESRVKRQLLKEIKNICPADVTIMQVRQGHAKGLGHAVLCAKSMVGDNPFIVMLPDVLLDDSTADLSKENLASMIKRFEETGHSQIMVEPVPKADVSKYGIADCGHVALAPGESTLMTAVVEKPSIAEAPSNLAVVGRYVLSKNIWPLLEKTPRGAGDEIQLTDAIAMLMQQEPVEAFHMTGKSHDCGDKLGYMKAFVTYGVRHHTEGEKFTAWLKQQLD

SEQ ID NO: 78376 - protein, 218 aa, Yersinia pestis
MFTGIVQGTGLVVAIEEKSNFRTHVVELPIDMLPELALGASVAHNGCCLTVTHIEGNRVSFDLMKETLRLTNLGDINVGDKVNLERAAKFSDEIGGHLMSGHIICTAEIAKIYTSENNRQIWFRMPSEDLMKYVLHKGFIGIDGISLTIGEVVGNRFCVHLIPETLSRTTLGKKRLGHRVNIEIDPQTQAVVDTVERVLAQRNIANAALVDEKFVRVS

SEQ ID NO: 78377 - protein, 469 aa, Yersinia pestis
MSKQQIGVVGMAVMGRNLALNIESRGYSVSIFNRSSDKTDEVVAENPGKNLVPSYTVEEFVDSLEKPRRILLMVKAGEATDKTIASLTPHLDKGDILIDGGNTYYKDTIRRNRELSAQGFNFIGTGVSGGEEGALKGPSIMPGGQKEAYELVAPILEKIAARADDGDACVAYIGADGAGHYVKMVHNGIEYGDMQLIAEAYSLLKQSLGLSNEELASTFAEWNKGELNSYLIDITKDIFTKKDEDGNYLVDVILDEAANKGTGKWTSQSSLDLGEPLTLITESVFARYLSSLKDQRVAASKVLTGPKVQPFTGDKAEFIEKIRRALYLGKIVSYAQGFSQLKAASNENNWDLNYGEIAKIFRAGCIIRAQFLQKITDAYAENADIANLLLAPYFKQIADEYQQALRDVVSYAVQNGIPTPTFSAAINYYDSYRSAVLPANLIQAQRDYFGAHTYKRTDKEGVFHTEWMA

SEQ ID NO: 78378 - protein, 470 aa, Yersinia pestis
MKKTKIVCTIGPKTESEEMLTNLLNAGMNVMRLNFSHGDYAEHGQRIKNLRAVMAKTGKKAAILLDTKGPEIRTMKLEGGKDAALVAGQTFTFTTDQSVVGNDKIVAVTYPGFAADLKIGNTVLVDDGLIGMEVIEVTEHTVVCKVLNSGDLGENKGVNLPGVSIQLPALAEKDKGDLIFGCEQGVDFVAASFIRKRSDVLEIREHLKAHGGEHIQIISKIENQEGLNNFDEILEASDGIMVARGDLGVEIPVEEVIFAQKMMIEKCNRARKVVITATQMLDSMIKNPRPTRAEAGDVANAILDGTDAVMLSGESAKGKYPLESVTIMATICERTDRVMPSRIESLNDNRKMRITEAVCRGAVETAEKLEAKVIVVATGGGKSAKSVRKYFPTATILALTTNEMTAHQLILTKGVITQLVDEIASTDDFYRLGKEAALASGLAQKGDVVIMVSGALVPSGTTNTSSVHVL

SEQ ID NO: 78379 - protein, 299 aa, Yersinia pestis
MLDKTRLRIAMQKSGRLSDESQELLSRCGIKINLQQQRLIAFAENMPIDILRVRDDDIPGLVMDGVVDLGIIGENVLEEELLNRRAQGDDPRYFTLRRLDFGGCRLSLAAPLDAEYTGPQCLQDTRIATSYPHILKQYLDKQGVRFKSCLLNGSVEVAPRAGLADAICDLVSTGATLEANGLREVEVIYRSKACLIQRDGEMSVDKQQLIDRLMTRIQGVIQARESKYIMMHAPSERLDEIITLLPGAERPTILPLAGDKSRVAMHMVSSETLFWETMEKLKALGASSILVLPIEKMME

SEQ ID NO: 78380 - protein, 248 aa, Yersinia pestis
MLSIKNLKVSVEGNEILKGLDLEIKPGEVHAIMGPNGSGKSTLSAALAGREEYEVTEGEVTFKGKDLLELAPEDRAGEGVFLAFQYPVEIPGVSNHFLLQTSVNAVRKYRQQAPLDRFDFSDFIEEKIALLKMPADLLTRSVNVGFSGGEKKRNDILQMAALEPSLCILDETDSGLDIDALKIVANGVNSLRNENRSFIIVTHYQRILDYVKPDFVHVLYQGRIIKSGDFTLVKQLEEQGYGWLTDQQ

SEQ ID NO: 78381 - protein, 800 aa, Yersinia pestis
MFAHDKANNNKAADKTGTVTPTHIVSPEAAPTVSGAQMTEMAGGIGDAVGGTAGKRINQAAEVAKTALDAKAKVLDGGVTPTNIVATGPAPTVSGAQMTEMAGGIGDAVGGTAGKRINQAAEVAKTALEAKAKVLDGGVTPMNLAAGGAGAGLPDSAAAAISRLVKQPSGLQFTLTTASLPPQTFAVVDFTLSEMLSSPFVLNVGLASADPAVDFAAVLDEDATLFIWREGVLQRSITGMVASFEQGDTGFHQTRYSMVIRPALWRTSLRRNARIFQQASVEEIITTLLKENGINDFAFGFRHPHPVREFCVQYQESDFDFIQRLTAEEGIFYYFEFSAGKNTVVYADDVGSLPKGASLPYNPNVAAQAQELSITTFTRSAQVRPAMVQLKDYTFKNPNWAAAFSEQSGELQNQRPDYEHFDFPGRFKDAQHGQDFTRYRLDALRNDANLGQGASNDFTLQPGQLFSLYNHPRGDLNHAWQLLGIQHSGKQMQALEQASGDQGTVLFNHFSFIPHTQTWRPTPLAKPAMDGPQIAMVVGPPGEEIYCDEYGRIRLQFLWDRYGQSNDNSSCWIRVTQPWAGQGWGMLAIPRIGQEVVVDFLHGDPDQPIVTGRTYHANNIPPGSLPASKTQMAFRSKTHKGEGYNEMRFEDAKGGEGLFMHAQKDMTTMVLNDRKTDVTQDHSEHIGQDQSVTVVRNQSNTIQNDRRVEVTRDQQTEVGNDYQLVVKGEKKEFVTKIRYTEVHEDETLTVTKSIKIHAKQGDISISTPNAGITITHDGAIVLQGKYIRLAADMIDLNPEE

SEQ ID NO: 78382 - protein, 954 aa, Yersinia pestis
MFEAARVDDKLYHSSALAGFIIGSIIGAAVIFAAAAYAASIVLTGGATLVATGFIVGMGVTTLGVVAGGLIRSVGEKIGSMCHHDVGQITTGSKNVKVNSKRAAHVELSTVACKDDSAIQRMAEGSSNIFINSKAAVRLEDKTTCDAVVDSASSNVTFGGGRVQYLDIKREISDEMRDLSEKLFIVAGLAGGIFGAAKQAGCFGLKCLSKIALGEMAGAAAGYGLEKGVGAIAGYFGYPVDVISGQKLLTGEGDDTDFILPGIFPLHWSRIYRSENHHVGALGQGWSLVWERSLRKEDDSIVYQNDEGREIVFPLIKRGERYFSPTEHIWLARTERDTYAISSPFETCFIFEAFSEAGVAKLASLEDLNGHALYFSYDDIGQLKKISTTSGYGVYCQYEKGRLVSVACVKGGTPGTLVRYQYNEQHQLVSVTNREGQITRQFGYHGHLINKLADVRGLECRYTWADIGGTPRITHSATNLGEQWQFDYDIDNQQTTLTDLNTGQTACWGYNAQHLITDYRDFDGGKYAFDYNDLNMPVRVVLAGERTLVLVYDALARPIQITDPLKRETHIDYHRNSLRVVRRQYPDGQVWKGEYDRTGRLLKENAPDGGVTLYHYPGASSLPERITNAVGAQTHLGWERHGQLTEHTDCSGKLTRYEYDIDGHLLTVIDAENHSTHYSYNRLGQPTGIRYADGRKEQLRYNAQGLVEQFTDPVGRQLHWRYNLRGQPVSFTDRLQREYRYRYDCHGQMIELDNANGGQYHFRWSSGGQLVEEQYPDNLVRRYRYGESGMLMALETTAPTVDDLTVSRQVSFDYDAGGRMTQRLTGMSATRYDWDIMDRLLLAERVPTAVGEQAGIVGHGVRLAYDKAGHLLTESGDLGAVTYQWDPLHHLAALTLPDGQTLSWLRYGAGHVSAIRHGDTLISEFSRDNLHREVSRTQGILTQYRDYDAMGRRL

SEQ ID NO: 78383 - protein, 732 aa, Yersinia pestis
MFAHDKANNNKTADKTGTVTPTHIVSPEAAPTVSGAQMTEMAGGIGDAVGGTAGKRINQAAEVAKTALDAKAKVLDGGVTPLNLAAGGAGAGLPDSAVAALTRLVKQPSGLQFTLTTASLPPQTFAVVDFTLSEMLSSPFVLNVGLASADPAVDFAAVLDEDATLFIWREGVLQRSITGMVASFEQGDTGFHQTRYSMVIRPALWRTSLRRNARIFQQASVEEIITTLLKENGINDFAFGFRHPHPVREFCVQYQESDFDFIQRLTAEEGIFYYFEFSAGKNTVVYADDVGSLPKGASLPYNPNVAAQAQELSITTFTRSAQVRPAMVQLKDYTFKNPNWAAAFSEQSGELQNQRPDYEHFDFPGRFKDAQHGQDFTRYRLDALRNDANLGQGASNDFTLQPGQLFSLYNHPRGDLNHAWQLLGVQHSGKQMQALEQASGDQGTVLFNHFSFIPHTQTWRPTPLAKPAMDGPQIAMVVGPPGEEIYCDEYGRIRLQFLWDRYGQSNDNSSCWIRVTQPWAGQGWGMLAIPRIGQEVVVDFLHGDPDQPIVTGRTYHANNIPPGSLPASKTQMAFRSKTHQGEGYNEMRFEDAKGGEGLFMHAQKDMSTTVKDNQTTTVEKGNQTVTVEKGDRTVTVATGNETTDITQGSLTETIKVRRSTCANFIQVKAEGDAPGTQLYTATEQIKFVVGKSSITLNPDSIILQFSGSTSITLNAANIDAIAPLINLNKDKG

SEQ ID NO: 78384 - protein, 476 aa, Yersinia pestis
MSDKNKQPTFYVHDYETFGQRPALDRPAQFAGVRTDLDFNLVEEPLVIYCKPADDYLPQPEAVMITGITPQHALANGVNEAEFSRQIHQAFSVPGTCILGYNNIRFDDEVSRNIFYRNFYDPYAYSWQGGNSRWDLLDVMRACYALRPEGIVWPENDDGLPSFKLEHLTKANGVEHLQAHDAMSDVYATIAMAKLVKQAQPRLFDYLYQHRSKHKINALIDIAEMTPLVHVSGMFGAARGNTSWVAPLAWHPENKNAVIMCDLAGDMSPLLELDSDTLRERLYTRRDKLQAQESAIPIKLVHINKCPVLAPAKTLLPENADRLGIDRQRCLQNLQLLRQNPQVREKVVALFAQAEPFAVTDDVDTQLYNGFFSDADRATIKIIQQTESQNLPALDLTFQDPRLEALLFRFRARNYPNTLNDSEQQRWLQHRREALSPERVQDYVLQLEQFYNQYEDDKEKLALLKALFEYAKGLVS

SEQ ID NO: 78385 - protein, 367 aa, Yersinia pestis
MNDPQQRLLDLPKLMFGVIFIMGMIIASFWVIQPFVMGFAWAGMVVIATWPLLIRLEKLLWGRRSLAVVVMTILLILLFVIPIALLVSSLVENSAPLIQWASSPSNLRMPNVDWMKSIPLIGDKLYSSWNTLISGGANALMAKVQPYIGATATWFVAQAAHVGYFLIHLALMVLFSVLLYIHGEQVALGIRHFAMRAADKRGDAVVVMAAKAIRAVALGVVVTALVQAILGGIGLAIAGIQYATLLTVLMFICCVAQLGPLLVLVPAVIWVYWTGDTTWGTILLVWSCIVGTLDNFLRPYLIRMEADMPMILILSGVIGGLLSFGMIGLFIGPVVLAISYRLISAWVHETPEPEESVTDAAKHLEEL

SEQ ID NO: 78386 - protein, 1512 aa, Yersinia pestis
MTVAQSIGTGYGAAGAQSALRQTALGQQSPARTDYQVSNPNVGNIARASDSLLNVAESQQFNTLVTAGFGMQAIAAGVAGGYVGAKIGNKLGHGIARALNFNQVATEGESPAHLGHPIAHQKKDWGVWGAIGGILLGAAAAALVVVTFGTGLVVIAAAAAAAGLIGGIAAATGAALGQYGDNKGVIAEGSANVFFEGQPVARVGDKIQCSDHPSSPPPMIAEGAKTVFANQKQIARLGHRTTCDGNINAGCGSLAITQETAYVYEVADSRNPYLRWSAVILSFLPIQKKFEQGFRSLKKPPNTAVNATHNCPTGSDPVDMVSGDYLQVWPVIDIAGVLPVRLQRTYRSGDYFTVSGCFGHKWADSWSQHLVVHEDNIDYIDEEGVGLSFFTPENKVQAVNLYNLRYELVGERHGELRVFDRSTQQTLHFNQQQQQQRYLSAITDRKGNRIDFRYQQGELISVEHSDGYVLEIDSRGRTIHAVELVTQEKRQKLLQSTFSERGYLVQCQSFQYGTLSHEYDPKGYMVRWRDTDSTDVAVRYDISGRVVALKTSTGFFADHFIYHDKERYTIYRDGEGGETGYHYNENNLLIKLVDPLGNTTLTDWDLTQKIKETDALGRITRFIYNERGDLTAVILPDETRTEYEYNPSGVVTAFTSSAGDSWQYQYDRQGLLRQVTYPSGQTMSFRYGKKGEVLRKIIAEDQVWRYHYDHHGCLSTIIDPKGNSTAVTLDVLGRLFSHQNALGELTRYTHSDAHASPAGSVTKMVMPDGVEQAIAYDSEKRIAALTDGAGKTTRYEYGGFDLLTGLIRPDGQRLTFGYDTLTRLNQVTNASGDTYRYTRDRAGQVISETDFTGRTVHYQYDAVGRRIGARYPDQRLVRWHYSMQDQVLAQQTWHCDALSSTLVGTVSYGYDGAGRLLSATNADAVVEFDYDEAGQLVAERLNGREVRHQWDALNGTPVARQVGELGLTFVYGAQGELTRLQLAGHQPLQLQHDRLGRETVRESAAGFIQACNYTPSGLLAHQAAGRNSALFQQQLIAPESPALHGSAVNRSWQYDRAYNVVGMDDGRWGKTQYQYDRNDQVVRADFGGFLPLQEQFSYDVNQNLREHRCLPRGAQAVLAQASQQQQAGRVVKRGDSQYRYDAAGRLVEKRSQKDGYRPQLWRYRWNEQDQLSELITPTGARWRYGYDAFGRRIRKLRVVDTPPLNEMDAPSTGPATASLAGYAYLWSGDQLIEEVPVYADGTVAYEQGIHWLYAPGGLTPMARYAQGKLHYVVADHLGTPRELLNEQGKVVWASRLSTWGQAELWRQAANEEDRVSCNLRFAGQYADAESGLHYNRFRYYDGETGQYLCPDPIGLEGGLNPYGYVHNPVSWVDPLGLATCPMREVNGTKIFGKGQKDGTPGHDQFSEVIANKLAMSGKFKEVYLNRSYNFANGKGISGRRPDIMAVDMNGKVHAIELASKTDMGRKFPSLRTRNQDAMKNLPSIDRGSVIVLEHQYNSSKIKNALDNLISGI

SEQ ID NO: 78387 - protein, 273 aa, Yersinia pestis
MERCVFYISDGTAITAEVLGHAVLSQFPINVTTFTLPFVENAARAQSVCKQINEIYQDTGVRPLVFYSIISLEVREIIQRSEGFCQDIVQALVAPLQGELGVPPQPVLNRTHGLTESNLDKYDARIAAIDYALAHDDGISLRNLDQAQVILLGVSRCGKTPTSLYLAMQFGIRAANYPFIADDMDNLQLPAALKPFQHKLFGLTINPERLAAIREERRENSRYASLRQCRMEVGEVEALFRKNQIRYLNSTNYSVEEISTKILDILGMSRRMF

SEQ ID NO: 78388 - protein, 128 aa, Yersinia pestis
MKGYLWGGASVVLVTVAQLVLKWGMMNIPLLSLADINVQFLTMYFVQLASVMCGLMGYALSMLCWFFALRYLPLNRAYPLLSLSYALVYLGAVLLPWFNEPATLLKTLGAGFILLGIWLINIKPIKAS

SEQ ID NO: 78389 - protein, 280 aa, Yersinia pestis
MKLLRYGPVGEERPALLDELGEIRDLSAHIEDISGKFLLPATLYKLRQLDSASLPLVRGEQRLGACVGHVGKFICVGLNYADHAAETGAEIPQEPVIFNKWTSAIIGPNDDIEIPRNSVKTDWEVELGVVIGTGGRYIGEANAMSYVAGYCVVNDISEREFQLEHGGTWDKGKGCDTFGPIGPWLVTRDEIPDPHQLGLWLDVDGRRYQNGSTRTMIFKIPQIISYLSRFMSLQSGDVISTGTPPGVGLGQKPPVYLHAGQIMRLGIEGLGEQCQKTIQA

SEQ ID NO: 78390 - protein, 381 aa, Yersinia pestis
MIISASTDYRAAAQRKLPPFLFHYIDGGAYNEQTLRRNTADLADIALRQRVLKNMSELSLETQLFGETQAMPVVLGPVGLSGMYARRGEVQAARAADKKGIPFTLSTLSVCPIEEVAPAIARPMWFQLYVLKDRGFMRNALTRAQAAGVKTLVFTVDMPVPGARYRDAHSGMSGPNAAARRLLQAIAHPQWAWDVGLNGKPHDLGNISAYLGKPTTLEDYMGWIATNFDPSISWKDLEWVREFWQGPMIIKGILDPEDAKDAVKFGADGIVVSNHGGRQLDGVLSTARALPAIADAVKGDITILADSGIRTGLDVVRMIALGADSVLLGRAFVYALATAGEAGVINLLTLIEQEMRVAMTLTGAKRIADINRDSLAVSERG

SEQ ID NO: 78391 - protein, 667 aa, Yersinia pestis
MKAIVFAYHDIGCVGLNALAEAGYDIQAVFTHTDNPGENRFFSSVARVAADLALPVFAPEDVNHPLWVERIRELQPDIIFSFYYRNMLSDEILSLAPQGGFNLHGSLLPQYRGRAPINWVLVNGETETGVTLHQMVKKADAGPIAGQYKVAISDVDTALTLHAKMRDAAQELLRNLLPRMKEGPLPLTPQKEADASYFGRRTAADGEIHWQKSAFTINNLVRAVTEPYPGAFSYLGQRKLTIWRSRPLDLVHNKLPGTVLSTAPLTVACGEGALEIITGQGEAGLYVQGDRLAQEMGIVTDVRLGNKPSNTLKRRTRVLILGVNGFIGNHLTERLLQDDRYEVYGLDIGSDAISRFLGNPAFHFVEGDISIHSEWIEYHIKKCDVILPLVAIATPIEYTRNPLRVFELDFEENLKIVRDCVKYNKRIVFPSTSEVYGMCDDKEFDEDTSRLIVGPINKQRWIYSVSKQLLDRVIWAYGVKEGLKFTLFRPFNWMGPRLDNLDAARIGSSRAITQLILNLVEGSPIKLVDGGAQKRCFTDIHDGIEALFRIIENRDGCCDGRIINIGNPTNEASIRELAEMLLTSFENHELRDHFPPFAGFKDIESSAYYGKGYQDVEYRTPSIKNARRILHWQPEIAMQQTVTETLDFFLRAAVIEKTAAPKDELNA

SEQ ID NO: 78392 - protein, 549 aa, Yersinia pestis
MEIFFTILILILVVSLSGVVTRMLPFQVPLPLMQIVCGALLAWPNFGLHVNFDPELFLVLFIPPLLFADGWKTPTREFIHHGREILGLALALVLVTIVGIGYLIYWMVPGIPLVAAFALAAVLSPTDAVALSGIVGKGRIPKSIMGVLEGEALMNDASGLVALKFAIAVAMGTMIFTVSGATLEFLKVAIGGLLAGVAITWLYSKSLRIMSRWSGDDPATQIVLLLLLPFASYLVAEHLGVSGILAAVAAGMTISQSGIIRNAPLAMRLRADSVWSMLEFVFNGMVFILLGLQLPGILETSITQAELDPTIQTWNLFADVAIIYGALLLLRFGWLWSMKKISKRVLTKRPLQFSDYTTRELWVASFAGVRGAITLAGVLSIPLFLSDGSAFPSRYQLVFIATGVILLSVIIGVIALPPLLRGVVVADKSASREEIRLARAAMAEVAIVSLNKMEERLMTSSEENIDSELLKEVSSRVIGTLRRRTGSKDEVENTLLIENLERRFRLTALRAERGELYHLRATQKISNETLQKLLHDLDLLEALLIEKEG

SEQ ID NO: 78393 - protein, 335 aa, Yersinia pestis
MQTSQLFTALQQRQRQRDYRYLTGLVVMLLFALLISLCAGDVWIWPEHWFSESGKLFVWQLRLPRSMAVIMVGASLAVSGAVMQALFENPLAEPGLLGVANGAGVALVTAVLLGHGLLPIWVLSTCAIIGALLMTSILLSFTRRRLLTNAQLLLVGVALGIICSAMMTWAVYFSTSLDLRQLMYWMMGGFSGVDWRQQSLVLALLPTVIWLCCQGRVLNFMSLGEQQARQLGVSLHLWRNLLVLAIGLLVGISVALAGVISFIGLVIPHILRLTGLTDQRRLLAGCAFAGGGVLLLADVVARTVLSSAELPIGVVTATLGSPLFIWLLIRVKGVK

SEQ ID NO: 78394 - protein, 306 aa, Yersinia pestis
MIKPQKFHISLLHPRYWLTWFGLGVLFLLVQLPYPLLNKLGVWLGRTSMRFLKRRVSIARRNLELCFPDMDKQVLEQTIIGNFESLGMGLLETGMAWFWSDTRIQRWFSVSGLENLKRAQQGKRGVLVIGVHFMSLELGGRVMGQCQPMMAMYRPHNNKVMELVQTWGRMRSNKAMLDRRDLRGMVRALKQGEAVWFAPDQDYGPRGSVFAPLFAVEHAATTSGTFMLARLAKPALLPLVLLRKKEGRGYDLLIQPALEDYPIDDEIAAASYMNKVIEKEIMRAPEQYLWLHRRFKTRPIGEPSLY

SEQ ID NO: 78395 - protein, 330 aa, Yersinia pestis
MRLPTSFPTLCLTASALLLSQVLFSQSATAQQIKAADVHPKDYPNVVAMKDMGEKLKVATDGRLEMKTFPGGVLGDEKQMIEQAQMGAIDIIRVSMTPVASILPEINVFTLPYIFRDEDHLHKVLDGKIGQEIGGKITDNKNSKLVFLGWMDGGTRHLITKQPVIKPEDLSGMKIRVQGSPIALATLKSMGANALSMGVSEVFSGMQTGVIDGTENNQPTFVAHNYLPVVKNYTLSGHFIIPEVFLYSKAKWDKLSAEDQQTILKLAKEAQAEQRVLWTAYEQQAHEKMKAGGVQYHEIDRDYYYKATQPVRDEFGKGHEDLIKQIGDVQ

SEQ ID NO: 78396 - protein, 795 aa, Yersinia pestis
MKFSELWLREWVNPAISSDDLAHQITMAGLEVDGVDAVAGEFNGVVVGHVVECGQHPNADKLRVTKIDVGGDRLLDIVCGAPNCRQGLKVAVATVGAVLPGDFKIKAAKLRGESSEGMLCSFSELAISDDHDGIIELPADAPIGVDVREYLHLDDKTIEISVTPNRADCLGIIGVARDVAVVNQLPLTEPDMAEVVASINDTLPIRVDAPQACPRYLGRVVKGINVKAATPLWMREKLRRCGIRSIDPVVDVTNFVLLELGQPMHAFDLDRISGGVIVRLATDGEELTLLDGTKAKLNADTLVIADHQKPLAMAGIFGGEHSGVNEETRNVLLESAFFNPLSITGRARRHGLHTDASHRYERGVDPALQHKAIERATRLLIDICGGEAGPVVDVTTASELPKQATITLRREKLDRLIGHHIPSEQVSDILRRLGCKVTECGSDWQAVAPSWRFDMAIEEDLVEEVARIYGYNNIPDVPVRADLVMTKHREASLSLKRVKTALVDRGYQEAITYSFVDPKVQALLHPQQEALILPNPISVDMSAMRLSLLTGLLSAVVYNQNRQQSRLRLFESGLRFVPDNTADLGIRQDVMLAGVIAGHRYDEHWDLARQPIDFYDLKGDLEAILELTGKLSDVQFRAEAHSALHPGQSAAIYLAGEHIGFIGVVHPELERKLDLNGRTVVFEVQWNKLADRAVPQAREISRFPANRRDIAVVVAENVPAEDILAECKKVGANQVVGVNLFDVYSGKGVAEGYKSLAISLVLQDTARTLEEEEIAATVAKCVEALKQRFQASLRD

SEQ ID NO: 78397 - protein, 327 aa, Yersinia pestis
MPHLAELVAKAKAAVEGAQDIAALDLVRVEYLGKKGHLTLQMTSLRELPAEERPAAGAVINQAKQEVQEALNARKEKLESAVLNARLAAETIDVSLPGRRMENGGLHPVTRTIERIETFFGELGFSVESGPEIEDDYHNFDALNIPAHHPARADHDTFWFDATRLLRTQTSGVQIRTMQEQQPPIRIIVPGRVYRNDYDQTHTPMFHQMEGLIVDRDISFTNLKGTLHDFLRNFFEEDLQIRFRPSYFPFTEPSAEVDVMGKNGKWLEVLGCGMVHPNVLRNVGIDPEIYSGFAFGMGMERLTMLRYGVTDLRAFFENDLRFLKQFK

SEQ ID NO: 78398 - protein, 118 aa, Yersinia pestis
MARVKRGVIARARHKKILKQAKGYYGARSRVYRVAFQAVIKAGQYAYRDRRQRKRQFRQLWIARINAAARQNGLSYSRFINGLKKASVEIDRKILADIAVFDKVAFSALVEKAKAALA

SEQ ID NO: 78399 - protein, 65 aa, Yersinia pestis
MPKIKTVRGAAKRFKKTANGGFKRKHANLRHILTKKATKRKRHLRPKGLVSKNDLGLVVACLPYA

SEQ ID NO: 78400 - protein, 183 aa, Yersinia pestis
MKGGKRVQPARPNRINKEIRATEVRLTGVDGEQIGIVSLNEALEKAEEAGVDLVEISPNAEPPVCRIMDYGKFLYEKSKSTKEQKKKQKVIQVKEIKFRPGTDDGDYQVKLRNLIRFLEDGDKAKITLRFRGREMAHQQIGMEVLNRVRKDLCEDSDLAVVESFPTRIEGRQMIMVLAPKKRQ

SEQ ID NO: 78401 - protein, 642 aa, Yersinia pestis
MPVITLPDGSQRHYDHAVSVLDVALDIGPGLAKACIAGRVNGELVDASDLIESDAQLAIITAKDAEGLEILRHSCAHLLGHAIKQLWPDTKMAIGPVIDNGFYYDVDIEHTLTQEDLALLEKRMHELADKDYDVIKKKVSWQEARDTFAARGEDYKVAILDENISRDDRPGLYHHEEYVDMCRGPHVPNMRFCHHFKLQKTSGAYWRGDSKNKMLQRIYGTAWGDKKQLNAYLQRLEEAAKRDHRKIGKQLDLYHMQEEAPGMVFWHNDGWTIFRELETFVRMKLKEYQYQEVKGPFMMDRVLWEKTGHWENYAEHMFTTSSENREYCIKPMNCPGHVQIFNQGLKSYRDLPLRMAEFGSCHRNEPSGALHGLMRVRGFTQDDAHVFCTEEQVRDEVNSCIKMVYDMYSTFGFEKIVVKLSTRPEKRIGSDELWTRAEDDLAAALTENGIPFDYQPGEGAFYGPKIEFTLHDCLDRAWQCGTVQLDFSLPGRLSASYIGENNDRQVPVMIHRAILGSMERFIGILTEEYAGFFPTWLAPVQVVVMNITDSQSDYVQQVTKKLQDAGIRAKADLRNEKIGFKIREHTLRRVPYMLVCGDKEVESGKIAVRTRRGKDLGSLDVNVVVDQLLAEIRSRSLHQLEE

SEQ ID NO: 78402 - protein, 227 aa, Yersinia pestis
MLSIFELFKAVGLGLVLLLPLANPLTTVALLLGLSGNMTREERNNQSLMAAIYVFFIMTIAFYAGQIVMSTFGISIPGLRIAGGLIVAFIGFRMLFPQQSAEDTQLEAKSQDLKKRKSINIAFVPLAMPSTAGPGTIAMIISSAATMKDQTMFAPWVLAIAPVITFLCVSLILWGSLLSSGAIMRWVGKSGIEAISRLMGFLLVCMGVQFIINGVLELISTYQPVMA

SEQ ID NO: 78403 - protein, 81 aa, Yersinia pestis
MRVEVSIDKKNQLPAGAIEALTQELTKRLNTKFPDTATAVQVRYASANNLSVLGGAKTDKDVISEILQEIWESADDWFDAE

SEQ ID NO: 78404 - protein, 348 aa, Yersinia pestis
MTAQPQTLKIRRPDDWHIHLRDDEMLSTVLPYTSEVFARAIVMPNLAQPITTVASAIAYRERILAAVPAGHKFTPLMTCYLTNSLDAKELTTGFEQGVFTAAKLYPANATTNSTHGVSDIPAIYPLFEQMQKIGMPLLIHGEVTDAAVDIFDREARFIDQILEPIRQKFPELKIVFEHITTKDAADYVLAGNRFLGATVTPQHLMFNRNHMLVGGIRPHLFCLPILKRSTHQQALRAAVASGSDRFFLGTDSAPHAKHRKESSCGCAGVFNAPAALPAYASVFEELNALQHLEAFCALNGPRFYGLPVNDDVVELVRTPFLQPEEIPLGNESVIPFLAGQTLNWSVKR

SEQ ID NO: 78405 - protein, 491 aa, Yersinia pestis
MPVPIIPVSLSAAAQKNAKINTKKLAEIRERILSLLLNNRALVDGILGRQEERENLSDEQLQDQTAEIKTLLDDLHAADLADLLEALPNDERLALWRLVKNEKRGQTLVEVSETVWDTLIKEMSDKDLLKAMRTLHVDEQAYLAEYLPRNLMGRLLTSLDPDQRARVREVIQYGRDSVGQMMDFELVTVRKDVTLATVQRYLRYRKRIPDATDKLFVIDRKNTLLGELPLTSILLNAPNTLVSEVMDQNPTTFQPEQKAEDAAGAFERYDLISAAVIDAKGKLMGRLTIEEIVDVVNEESDTTLRRMGGLSPEEDVFSPVGRAVRTRWSWLAINLCTAFIASRVIGLFEDTISQLVALAALMPIVAGIGGNTGNQTITMIVRALALHHIQQGSVSFLMLRELGVALINGLVWGGIMGLVTYLLYGDPAMGAVMTLAMMLNLLMAAVMGVTIPMTMARLGRDPAIGSSVMITAITDTGGFFIFLGLATLFLV

SEQ ID NO: 78406 - protein, 220 aa, Yersinia pestis
MLAGMGVIKPETLRYQVENVLRQAIMSGRFTPGERLIERELCETLGVSRTSIREALRRLEAEKLVSIVPHKGPIVAIISRQEAAELFALRGLLEGFAAREFAQRATDVAIVHFAQAIQALRMAGMTKDRAKVLKAKTDLYDVLLDNCGNGLVKETLTSLHSRINLLRATSLMDPQRLPVSINEIDDLYQALKARDPDAAERHVANAKEVALRILEETNAT

SEQ ID NO: 78407 - protein, 450 aa, Yersinia pestis
MFIGFDYGTANCSVAVMRDDAPTLLALENNDVYLPSMLCAPTREAVSECLHRHWQVPTGSDENQQLLRRAIAFNREEDIPVTADSLLFGLSALAQYIEDPEEVYFVKSPKSFLGANGLKPQQLALFEDLVCAMMFHIKRQAESVLAAEIRQTVIGRPVNFQGSGGEDANRQAEGILLRAAQRAGFRDIAFQFEPVAAGLDFEATLTEEKTVLVVDIGGGTTDCSVLLMGPKWQGLADRQQSLLGHSGCRVGGNDLDIMLAFKQLMPLFGMGGETEKGIAMPSLPYWNAVATNDVPAQSDFYSTVNGRFLRDLIRDAANPQHVERLLKVYQQRLSYRLVRAAEESKIALSDQEQVATTLDFVEAELGQIISQQQLAEAISPPLQRIQEQVSLALTTSNVKPDVIYLTGGSARSPLLRAALQQQLPGIPLVGGNDFGSVTAGLARWAQTLYR

SEQ ID NO: 78408 - protein, 198 aa, Yersinia pestis
MPQLVLASTSSYRRALLEKLQLPFITDAPETDETPHAGESTEALVQRLASAKAQALAGRYPQHLIIGSDQVCVIDGKITGKPLQYSTAVKQLQQASGQCVTFYTGLTLLNTANNSINCTCETFDVYFRTLSQAEIDGYLLREQPWNCAGSFKSEGLGITLFERLAGRDPNTLIGLPLIALTQMLIEQGVNPLTVKPVE

SEQ ID NO: 78409 - protein, 371 aa, Yersinia pestis
MDYDLIVIGSGSVGSAAGYYASQAGLNVLMIDSAMPPHQAGSHHGETRIMRHAYGEGEKYVPLVLRAQALWDQLAAQTGEKLFQACGVINLGPDNSTFLQNVQRSAQQYDLPVETLNSTQIREKWPVFTVPDNYIAVFEPQSGYLRSELAVKTLIKAVTEAGCGILFNCPVTAIESHQAGVDVVTIDGTYSATKVVVTAGTWVKELLPTLPVTPVRKVFSWHQADGRYSEANHFPAFTVEMPDNILYYGFPAQNDALKLGKHHGGQLIESAAQRKPFGRYAEDGTEVFSFLRHFLPGVGVCLRGEACSYDMSPDEDFIIDTLPEDERVMVVSGLSGHGFKFATALGEVAALFAQDKPSPIDISAFSLARFR

SEQ ID NO: 78410 - protein, 204 aa, Yersinia pestis
MKILIIDECFYTRSGVNTYLNSVSSIKLMDVPTVEEATLAIQEFQPDIIIVNLTQYCRYGGHCPLLAQFIHYCTRAKVYIYLDASYPFSETPIPLTESVSMPIPLTESVSILAKKHLPNLLRRLPGFSLERLGIQPNQQASLFSPQEHKVMCYWMTEMPNYRIARKLNISGSTVYSHKRHITEKIKVRNRLELCFIYNVFKYLY

SEQ ID NO: 78411 - protein, 342 aa, Yersinia pestis
MFKIMTLTTLLAGWVFQTHAETLTVVSFGGLNKDAQVKAFYKPFMAAGKGTIEAGEYNGEMARIRAMVETGQIGWDIVEVEGPELLRGCNEGLFETLDWSKLGDERQFIKGTVSQCGSGLFLWSMLLIYDASKFKTPVTSWADFWNVTTFPGKRSLRKTAKFTMEIALLADGVKREDVYRVLATPEGVERVFNKLDQLKPNIQWWESGAQPLQWLVSGDVVMGSVYNGRVGSALKEGHDFRMVWTDSIYDMDSWTIVKGSKKKVLAEQFIAFANLAENQKVFAENIAYGPTNINATLMIDPEIAANLPTAPANLAEAFPMNNQFWVEHSEDLEQRFNSWAAK

SEQ ID NO: 78412 - protein, 484 aa, Yersinia pestis
MQTDVVLPLVGYLVLVFGLSIYAYTRRQTGNFLNEYFIGNRSMGGFVLAMTLTATYISASSFIGGPGAAYKYGLGWVLLAMIQLPAVWLSLGVLGKKFAILARRYNAVTLNDMLYARYQSRLLVWLASISLLVAFVGAMTVQFIGGARLLETAAGIPYDTGLLIFGISIALYTSFGGFRASVLNDALQGLVMLIGTILLLVAVIHAAGGLHKAVETLQHIDPALVSPQGGDQILDVPFMASFWILVCFGVIGLPHTAVRCISYRDSKAVHRGIILGTIVVAILMFGMHLAGALGRAVLPDLKIPDQVIPTLMITVLPPFAAGIFLAAPMAAIMSTINAQLLQSSATIVKDLYLNLWPAELKNERKLARISSLSTLILGLLLLLAAWRPPEMIIWLNLLAFGGLEAVFLWPLVLGLYWERANAHGALSAMIVGAVCYTVLASFDIKIAGLHPIVPSLTLNLLAFYIGNLFGDRARARHPAIVSAD

SEQ ID NO: 78413 - protein, 316 aa, Yersinia pestis
MYTKILGTGSYLPVQVRSNADLEKMVDTSDEWIVTRTGIRERRIAGLDETVATMGFQAAEKALEMAGIDKDDIGLIIVATTSSSHAFPSSACQVQRMLGIKDAASFDLAAACAGFTYALSVADQYVKSGAVKHAIVIGSDVLSRALDPEDRGTIILFGDGAGAVVLGASEQPGIMSTHLHADGRYGELLALPYPDRQQDQPAYVTMAGNEVFKVAVTELAHIVDETLQANNLDRTALDWLVPHQANLRIISATAKKLGMGMDKVVITLDRHGNTSAASVPSAFDEAVRDGRIQRGQLVLLEAFGGGFTWGSALVRF

SEQ ID NO: 78414 - protein, 309 aa, Yersinia pestis
MSKFAMVFPGQGSQSLGMLADLAAQFPIVEATFSEASSVLGYDLWQLVQQGPAEELNKTWQTQPALLTASVAIWRIWQHQGGKLPSLMAGHSLGEYSALVCAGVLDFKQAVSLVELRGKLMQEAVPEGTGAMYAIIGLDNESIAKACEESAQGQVVSPVNFNSPGQVVIAGNKDAVERAGAACKAAGAKRALPLPVSVPSHCALMKPAADKLAVALEKIDFQEPLFPVVNNVDVKAEVSPVAIRSALVRQLYNPVRWTESVEFIAAEGVELLLEIGPGKVLTGLTKRIVDSLAAAAVNDVVTLNSALEH

SEQ ID NO: 78415 - protein, 355 aa, Yersinia pestis
MPVLHNRISNEELKARMLAETEPRTTVSFYKYFTLEDAKTFRDNLYSQFVKLGVFGRVYVAKEGINAQISVPANRYDEFKIALFASHPALDQVRLNVAHEDDGKSFWVLRLKVRERIVADGIDDDSFDPANIGHYLKADQVNQMIDDPDTLFVDMRNHYEYEVGHFENAIEVPSDTFREQLPMAVDMLQHDKEKNIVMYCTGGIRCEKASAYMLHNGFKNVYHVEGGIIEYARKAKEQGLPLKFIGKNFVFDERMGERISDDVIAHCHQCGTPCDAHTNCKNDGCHLLFIQCPVCAAKFEGCCSQICQEELKLPQEEQRSRRAGRENGIKIFNKSKGLLQATMHIPSPEKSADEK

SEQ ID NO: 78416 - protein, 449 aa, Yersinia pestis
MLDKIVIANRGEIALRILRACKELGIKTVAVHSVADRDLKHVLLADETVCIGPAPSVKSYLNIPAIISAAEITGAVAVHPGYGFLSENADFAEQVERSGFIFIGPRAETIRLMGDKVSAISAMKKAGVPCVPGSDGPLSDDTTKNKAFAKRIGYPVIIKASGGGGGRGMRVVRHDKDLEESINMTRAEAKAAFNNDMVYMEKYLENPRHIEVQILADGQGNAIYLAERDCSMQRRHQKVVEEAPAPGITSEMRRYIGERCAKACMEIGYRGAGTFEFLYENGEFYFIEMNTRIQVEHTVTEMITGIDLIKEQLRIAAGQPLSIKQDEVKVHGHAVECRINAEDPNTFLPSPGKITRFHAPGGFGVRWESHIYAGYTVPPYYDSMIGKLITYGENRDVAIARMKNALAELIIDGIKTNVELQQRIMNDENFQHGGTNIHYLEKKLGLQET

SEQ ID NO: 78417 - protein, 244 aa, Yersinia pestis
MSFEGKIALVTGASRGIGRAIAELLVERGACVIGTATSEKGAEAISAYLGENGKGLMLNVVDPTSIDTVLATIRAEFGEVDILVNNAGITRDNLLMRMKDDEWQDIIDTNLTSVFRLSKAVMRAMMKKRFGRIITIGSVVGTMGNAGQVNYAAAKAGVIGFSKSLAREVASRGITVNVVAPGFIETDMTRTLTDDQRAGILAQVPANRLGDAKEIASAVAFLASDEASYISGETLHVNGGMYMI

SEQ ID NO: 78418 - protein, 154 aa, Yersinia pestis
MDIRKIKKLIELVEESGISELEISEGEESVRISRAPAAPNYPMMQQPYAFAAPQQQPALAAAVAPAPVAEAAPAAISGHIVCSPMVGTFYHTPSPDAKAFVEVGQKVSVGDTLCIVEAMKMMNQIEADKSGTVKAILVENGQPVEFDEPLVVIE

SEQ ID NO: 78419 - protein, 444 aa, Yersinia pestis
MKSQSKRTSRLFVFVGVVVAIIIAVLSWRYFGTGSDNNTSGAQQSARGQDTSHGGRRNTPLAPVQAATATEQEVPRYLTGLGTVIAANTVTVTSRVDGELMALHFTEGQQVKAGDLLAEIDPRPYEVQLTQAQGQLAKDQATLDNARRDLARYQKLSKTGLISQQELDTQSSLVRQSEGSVKADQGAIDSAKLQLTYSRITAPISGRVGLKQVDVGNYITSGTATPIVVITQTHPVDVVFTLPESDIPAIIQAQKNAEKTHAIVPVEAWDRTNKQMLAQGYLLSIDNQIDTTTGTIKLKARFNNEDDVLFPNQFVNARIKVDLLQNAVVVPTAAVQMGSEGNFVWTLDDANKVSKHLVTTGIQNSQQVVIDAGLNAGQRVVTDGIDRLTEGVQVEVVTPRSANTDANPASAEKAAAEAEGSTPHQGRGRPANAPARSTTAAEKS

SEQ ID NO: 78420 - protein, 413 aa, Yersinia pestis
MSKRRVVVTGLGMLSPVGNTVESTWKAVLAGQSGISLIDHFDTSAYATRFAGLVKDFNCEDYISRKDARKMDAFIQYGVAAGMQAMQDAGLDITEANASRIGAAIGSGIGGLGLIEENHTALVNGGPRKISPFFVPSTIVNMIAGHLTIMYGLRGPSISIATACTSGVHNIGHAARIIAYNDADVMVAGGAEKASTPLGVGGFGAARALSTRNDNPQAASRPWDKDRDGFVLGDGAGMMVLEEYEHAKKRGAKIYAEVVGFGMSSDAYHMTSPPEDGSGAALAMVNALRDAGITTSQIGYINAHGTSTPAGDKAETQAVKSVFGEDAYKVMVSSTKSMTGHLLGAAGAVESIFTVLALRDQAIPATINLDNPDEGCDLDYVPHDARQVKDMEYTLCNSFGFGGTNGSLVFRKV

SEQ ID NO: 78421 - protein, 1052 aa, Yersinia pestis
MQVMPPTPGGGPSRLFILRPVATTLFMIAILLAGIIGYRALPVSALPEVDYPTIQVVTLYPGASPDVVTSSITAPLERQFGQMSGLKQMASQSSGGASVITLQFQLTLPLDVAEQEVQAAINAATNLLPSDLPYPPIYNKVNPADPPILTLAVTATAIPMTQVEDMVETRIAQKISQVTGVGLVTLSGGQRPAVRVKLNAPAVAALGLDSETIRTAISNANVNSAKGSLDGPTRSVTLSANDQMKSAEEYRDLIIAYQNGAPIRLQDVATIEQGAENNKLAAWANTQSAIVLNIQRQPGVNVIATADSIREMLPELIKSLPKSVDVKVLTDRTSTIRASVNDVQFELLLAIALVVMVIYLFLRNAAATIIPSIAVPLSLVGTFAAMYFLGFSINNLTLMALTIATGFVVDDAIVVIENISRYIEKGEKPLDAALKGAGEIGFTIISLTFSLIAVLIPLLFMEDIVGRLFREFAVTLAVAILISAVVSLTLTPMMCARMLSYESLRKQNRLSRASEKFFDWVIAHYAVALKKVLNHPWLTLSVAFSTLVLTVILYLLIPKGFFPLQDNGLIQGTLEAPQSVSFSNMAERQQQVAAIILKDPAVESLTSFVGVDGTNATLNNGRLQINLKPLSERDDRIPQIITRLQESVSGVPGIKLYLQPVQDLTIDTQLSRTQYQFTLQATSLEELSTWVPKLVNELQQKAPFQDVTSDWQDQGLVAFVNVDRDSASRLGITMAAIDNALYNAFGQRLISTIYTQSNQYRVVLEHDVQATPGLAAFNDIRLTGIDGKGVPLSSIATIEERFGPLSINHLNQFPSATVSFNLAQGYSLGEAVAAVTLAEKEIQLPADITTRFQGSTLAFQAALGSTLWLIIAAIVAMYIVLGVLYESFIHPITILSTLPTAGVGALLALMLTGNELDVIAIIGIILLIGIVKKNAIMMIDFALAAERDQGMTPYDAIYQACLLRFRPILMTTLAALFGALPLMLSTGVGAELRQPLGVCMVGGLIVSQVLTLFTTPVIYLLFDKLARNTRGKNRHRDEDIDSSELLNGQEPQ

SEQ ID NO: 78422 - protein, 268 aa, Yersinia pestis
MFWINGVEQNLISASDRSVQFGDGCFTTARVSDGRVVWLDQHVLRLQRATERLLLPTVNWKILTKEMVEAASHTESGVLKVIISRGSGGRGYSGTACQHPTRIISLSDYPAHYSTWRDRGISLALSPVPLARNPLLAGIKHLNRLEQVLIRAHLEQTEADEAVVLDTAGQLVECCAANLFWRKGNQVCTPDLSHSGVDGIMRQRIIACLAAHNMPVEIVVQPLNVLADADEVIVCNALMPVLPVNKVGKWVYKSRVLFDLLNLHCCDI

SEQ ID NO: 78423 - protein, 206 aa, Yersinia pestis
MRLSLRHITWLKIAIWLAATLPLLWLVLSINLGGLSADPAKDIQHFTGRMALKLLLATLLVSPLARYSKQPLLLRCRRLLGLWCFAWGTLHLLSYSILELGLSNIGLLGHELINRPYLTLGIISWLVLLALALTSTRWAQRKMGARWQKLHNWVYVVAILAPIHYLWSVKTLSPWPIIYAVMAALLLLLRYKLLLPRYKKFRQWFR

SEQ ID NO: 78424 - protein, 1024 aa, Yersinia pestis
MKFFALFIQRPVATTLLTLAITLSGIIGFSLLPVSPLPQVDYPVIMVSASMPGADPETMASSVATPLERALGRIAGVNEMTSTSSLGSTRIILQFDLNRDINGAARDVQAALNAAQSLLPSGMPSRPTYRKMNPSDAPIMIMTLTSDTFSQGQLYDYASTKLAQKIAQTEGVSDVTVGGSSLPAVRVELNPSALFNQGVSLDAVRQAISAANVRRPQGSVDAAETHWQVQANDEIKTAEGYRPLIVHYNNGSPVRLQDVANVIDSVQDVRNAGMSAGQPAVLLVISREPGANIIATVDRIRAELPALRASIPASIQLNIAQDRSPTIRASLDEVERSLVIAVALVILVVFIFLRSGRATLIPAVAVPVSLIGTFAAMYLCGFSLNNLSLMALTIATGFVVDDAIVVLENISRHLEAGVKPKVAALRGVREVGFTVLSMSISLVAVFIPLLLMAGLPGRLFREFAVTLSVAIGISLVISLTLTPMMCAWLLRSHPKGQQQRIRGFGKVLLAIQQGYGRSLNWALSHTRWVMVVLLSTIALNVWLYISIPKTFFPEQDTGRMMGFIQADQSISFQSMQQKLKDFMQIVGADPAVDSVTGFTGGSRTNSGSMFISLKPLSERQETAQQVITRLRGKLAKEPGANLFLSSVQDIRVGGRHSNAAYQFTLLADDLAALREWEPKVRAALAKLPQLADVNSDQQDKGAEMALTYDRETMARLGIDVSEANALLNNAFGQRQISTIYQPLNQYKVVMEVAPEYTQDVSSLDKMFVINSNGQSIPLSYFAKWQPANAPLAVNHQGLSAASTISFNLPDGGSLSEATAAVERAMTELGVPSTVRGAFAGTAQVFQETLKSQLWLIMAAIATVYIVLGILYESYVHPLTILSTLPSAGVGALLALELFDAPFSLIALIGIMLLIGIVKKNAIMMVDFALDAQRNGNISAREAIFQASLLRFRPIIMTTLAALFGALPLVLSSGDGAELRQPLGITIVGGLVVSQLLTLYTTPVIYLYFDRLRNRFSKQPLMKLE

SEQ ID NO: 78425 - protein, 212 aa, Yersinia pestis [sequence omitted]

SEQ ID NO: 78426 - protein, 638 aa, Yersinia pestis
MRFTTKLSAFMTLLVVLAMCLVLLGSTISFFYLCQKKMEQRLQSIVTAYDQSLLLQPINKKREWLPLMMQTLGVVDVSVKNSTSTLYQLHIPAVYTPWNSHSRYRQMVLPLLHQPGTEMHFNYIDPLGSYARSIYAAAILSLVVVVIALTLLLSFRWLRDQTVGQEKLERRARRILNGEREHAVRSEDYEWPPCASRAIDHLLSELMEVRAERNRVDTLIRTFAAQDAQTGLSNRQFFDNQLTTQLEETGAHGVVMMVQLPDFEALNETHDQQQVQELMSSLVNLLSTFVARYPSALLARYLNSDIAILLPHKTLKDADVMAAQLVNAVRTLPEPHIIDRESLLHIGIVAYRSGESVEQIMDNAGQATKSAALYGGNGWYVFDTQVPERGRGSVKWRTLLEQTLASGGPRLYQKPVITVDGKISHREIISRIYDGEQELLAAEFMPLVQLLGLGERYDRQKIDKIIPLLSLWPDETLAFSISVDSLLHRPFQRWLRDTLLQCKKSDRMRIIFELAEADVCQHIEEIRQMVRLLRGVGCKVMASQAGLTVVSTSYIKSLQVEMIKLHPGVVRSINFRYENQLFVESLTGACAGTQTKVFAAEVRTREEWQTLQEKGVYGGQGNFFAPPTPLNSGKKKYS

SEQ ID NO: 78427 - protein, 347 aa, Yersinia pestis
MFKKFRGMFSNDLSIDLGTANTLIYVKGQGIVLNEPSVVAIRQDRAGSPKSVAAVGHDAKQMLGRTPGNIAAIRPMKDGVIADFFVTEKMLQHFIKQVHSNSFMRPSPRVLVCVPVGATQVERRAIRESAQGAGAREVFLIEEPMAAAIGAGLPVSEATGSMVVDIGGGTTEVAVISLNGVVYSSSVRIGGDRFDEAIINYVRRNYGSLIGEATAERIKHSIGSAYPGDEVLEIEVRGRNLAEGVPRGFTLNSNEILEALQEPLTGIVSAVMVALEQCPPELASDISERGMVLTGGGALLRNLDRLLMEETGIPVVVAEDPLTCVARGGGKALEMIDMHGGDLFSEE

SEQ ID NO: 78428 - protein, 269 aa, Yersinia pestis
MLLVDSHCHLDSLDYQTLHSSVDDVLAKANARDVGFILAVATTLPGFTAMTALIGERKNVAFSCGVHPLNLDGGYDFQQLRELAAGTHVVAMGETGLDYFYQQDNIPLQQASFREHIRIGRELNKPVIVHTRDAREDTLSILREEQAQDCGGVLHCFTEDKATAATLLDLGFYISFSGIVTFRNAEQLRDVARYVPLDRLLVETDSPYLAPVPHRGKENQPAYVRDVAEYMAVLKGVSLESLAEATTANFCRLFHLDPSTLSSEKRPLP

SEQ ID NO: 78429 - protein, 464 aa, Yersinia pestis
MSSSSFTTERPFTPELLSPAGTLKNMRYAFAYGADAVYAGQPRYSLRVRNNEFNHENLALGIQEAHALGKRFYVVVNIAPHNSKLKTFLRDLKPVIEMGPDALIMSDPGLIMMVRDAFPQMDIHLSVQANAVNWATVKFWQQMGLTRVILSRELSLEEIAEIRAQVPEMELEVFVHGALCMAYSGRCLLSGYINKRDPNQGTCTNACRWEYNVQEGKEDDVGNIVHIHQPIAVKNVEPTLGIGAPTDKVFVIEEAQRPGEYMTASEDEHGTYIMNSKDLRAIQHVERLTQLGVHSLKIEGRTKSFYYCARTAQVYRRAIDDAVAGKPFDPSLLTTLEGLAHRGYTEGFLRRHVHEEQQTYEYGYSVSERQQFVGEFTGVRREGLAEVLVKNKFSRGDSVELMTPKGNIQFTLESMQDKKGQPADIAPGNGHIMYLPIPEEIDVEYGLLIRNLNGTNSRNPHEKA

SEQ ID NO: 78430 - protein, 477 aa, Yersinia pestis
MFKNAFANLQKVGKSLMLPVSVLPIAGILLGVGSANFSWLPSVVSHVMAEAGGSVFANMPLIFAIGVALGFTNNDGVSALAAVVAYGIMVKTMAVVAPLVLHLPAEEIATKHLADTGVLGGIIAGSVAAYMFNRFYRIQLPEYLGFFAGKRFVPIISGFTAIFLGILLSFIWPPIGKAIQIFSEWAAYQNSVVAFGIYGVVERSLVPFGLHHIWNVPFQMQIGEYTNAAGQVFNGDIPRYMVGDPTAGKLSGGFLFKMYGLPAAAIAIWHSAKPENRAKVGGIMISAALTSFLTGITEPIEFSFMFVAPILYFIHAILAGLAFPICILLGMRDGTSFSHGLIDFVVLSGNSSRIWLFPLVGICYGLVYYTIFRVLITKLNLKTPGREDSSTEQSVQGGTEMSAALVEAFGGKDNITNLDACITRLRVSVADVSKVDQAGLKKLGAAGVVVAGSGVQAIFGTKSDNLKTDMDEYIRNH

SEQ ID NO: 78431 - protein, 296 aa, Yersinia pestis
MPHTLLILNGKESGNPEVREAVKNVRDEGLTLHVRITWEHGDAKRYVEEAATLAVSTVIAGGGDGTINEVATALMSLPADKRPCLGILPLGTANDFATGCNIPLQIENALQLAVKGRAVAIDLAQVNGEHYFINMATGGFGTRITTETPDKLKAALGGVSYFIHGLMRLDALKADSCKIHGPDFHWSGDALVIGIGNGKQAGGGQLLCPDALINDGLMQLRLLTAKELLPAVLSTLFNGEKNKNVIDATVPWLDITAPNDITFNLDGEPLSGRHFHIEILPHAIQCRLPPNCPLLG

SEQ ID NO: 78432 - protein, 1307 aa, Yersinia pestis
MRRLPKIMFATGATIIVVVALLVSALRMMLPLINEYRPQIVAKIQSVSGIPLDVGFMQGTWETFGPTLELRDIRAQMPKADLQVQRVTLALDVWQSLLHWRWQFRDLTFYQLQLDLHTTLDATQNNGSNLETGNVHNIFLRQLDRFDLRNSRISFLTPSGPRAELEIPQLTWLNSSTRHRAEGQISLSTINGQHGVVQVRMDLHDNQGILNNGTVYMQADNIDLKPWISRWLQNNTGLDNAEFSLAAWLSIKSGEVYRGNVLLSQGQANWTVGSNSHQLSVDNFVLEGRRQGNGWQIDAPVLNLKTDGQAWPKGRLSALWLPENTQFIGPEQRQELRIRASNLQLERIGPLLPTLSPFTPELLARWADLQPQGYVDALALDIPISQPETTRFQAKWHDVSWQYWGQLPGVNHFDGELSGSARLGRLNINLKNSLLPYGDLFRAPLEVSQASGALNWRIDDKGWALWSDQLDVQAKSLWGNGSFYYMQPNQKPSQLNQAQPWLKILAGIRLYDATDAWRYFPVSLMGEKLADYLTEALQGGQVDNATLVYNGNPHDFPYKNKEGQFQVYVPLRNAVFQFQPDWPALDNLAIDLNFLNEGLWMNAPHTLLGKVIGSNISAIIPDYLKEKLYVDADVLGEGRDVHDYFTATPLKDSVAETLDELQVGGKISGRLHLDIPLEEESITHASGEVTLNNNSLLVKPLQSQLENINGKFRFYDGNLESETLSANWYGQPLTVNFTTKEQPKDFLVNVGLQGDWLPAKLPGVPDSLAKMLSGSANWQGKVAVKLPQHGKPDYQVDVSADLKKVSSHLPSPLDKNSGQALPLHVQVNGGLEAFTLSGSAGNNNAFNSQWLLQGEKVELARAIWQTDSKKIPSLPDDKALVFKLPAIDGERWLALLAPELATAASPFAASFSSPSATSSTQPKIKGSKTNVILPKRLTLQTPELLVGGQAWHQLTLQADPLPSGMKITAKGQEVDGSLLMADYGPWHADLNYLYYNPQWGSREANNPLAQAVSQEPTVLQKPQPPSGISFSDWPALQLRCKACWILGQNIGRVNADLTPKGSALILTNGLIEAGNGRANITGQWQQDRAGDKTTLNIGLNGPRIDETLSFFGLTTLIKNASFAINADLNWRGVPWEPQINTLSGTLKGRLGKGQLTDLGGGRAGQLLRLVSFDALLRKLQLDFSDTFSRDFAFDSIRSTATLKNGVMSTNDLVIDGLAADIAMNGKVDLVKRQIAMEAVITPELSATVGVATAFAINPIVGAAVFAASKILGPLWSKVSLIRYQITGSLDQPTIHEVLRQLKENEAP

SEQ ID NO: 78433 - protein, 268 aa, Yersinia pestis
MKTADCHISPVSGLTGESWRITGPGIDWLAREQSPHKSQLGVNRRRERKFLQHIAGNGLSPAVIAANQRWLVVNWLEGDVVTNEQFIPLVNHGQLARLLARLHHLPASGYRLDLRAQIARYGALIDPTRRSPGGVRLQHDFLRRPLPAITKIAPLHMDIHPGNLLTTPVGLKLIDWEYAADGDIALEIAALFRGNHWSMLQQQAFLQDYCNNEHGYHDIARLSRQIQQWLPWVDYLMLMWFEVRWQQTADPIFLAWAAPLRQRFNLSF

SEQ ID NO: 78434 - protein, 343 aa, Yersinia pestis
MGPVMLDVASYELDAEEREILKHPLVGGLILFSRNFHDAEQLRELVRQIRAASHERLVVAVDQEGGRVQRFRDGFTRLPAAQYFAAINDAATAAQLAQEAGWLMAAEMMAMDIDISFAPVLDIGHVSAAIGERSFHSDPQQARIMAECFIRGMHSAGMKTTGKHFPGHGAVTADSHKETPHDNRPLAEIRTHDMVIFRELIQRKLLDAIMPAHVIYTEADARPASGSAYWLQEILRQELGFEGIIFSDDLSMEGAAIMGSYAERGQASLDAGCDMILVCNNRQGAVSVLDNLSPIKADQLTRLYHSGQFDRQTLMASSRWQQANKALTALSERWDAHKQTLGQ

SEQ ID NO: 78435 - protein, 525 aa, Yersinia pestis
MTKNIHKHRILILDFGSQYTQLLARRVREIGVYCELWAWDVTEAQIREFNPSGIILSGSPESTIENGSPRAPDYVFTAGVPVLGVCYGMQTMAIQLGGKVESSNQREFGYAQVEIKADSALIRDIKDAINPAGEAVLDVWMSHGDKVAEIPADFVTVASTDTCPFAIMANEEKRFYGVQFHPEVTHTKQGLRLLERFVLGICGCEALWTSATIIEDAIVRLREQIGDDHVILGLSGGVDSSVTAMLLHRAIGKRLTCVFVDNGLLRLNEADQVLEMFGDKFGLNIVHVAAEDRFLSALTGVDEPEAKRKIIGRVFVELFDEEACKQEQVKWLAQGTIYPDVIESAASATGKAHVIKSHHNVGGLPKEMKLGLVEPLKELFKDEVRKIGLELGLPYDMLYRHPFPGPGLGVRVLGEVKKEYCDLLRRADAIFIEELHKADLYNKVSQAFTVFLPVRSVGVMGDGRKYDWVVSLRAVETVDFMTAHWAHLPYDFLGRVSNRIINEVNGISRVVYDISGKPPATIEWE

SEQ ID NO: 78436 - protein, 459 aa, Yersinia pestis
MSQSSASSIFTVSRLNQTVRELLEREMGQIWLTAEISNFSQPASGHWYFTLKDDRAQVRCAMFRNSNRRTTFRPQNGQQVLVRASITLYEPRGDYQLIAESMQPAGDGLLQQQFEQLKQQLAAEGLFDQSHKQPLPHPAKQVGVITSASGAALHDVLHVLQRRDPSLPVIIYPTSVQGVDAPLQIVRAIQLANLRAECDVLIVGRGGGSLEDLWSFNDERVARAIFNSHIPIVSAVGHETDVTIADFVADLRAPTPSAAAELVSRNQIELVRQIQGQQQRMEMAMDYYLAQRNQQFTRLEHRLQQQHPHLRLARQQTLLLKLQRRLEESAQTQIRLLSKRTERLQQRLQQVQPQGQIHRYNQRVQQQEYRLRQAVERQLNGYRQRFGIACSQLEAVSPLATLARGYSVTQTPAGALLKTTKQVQAGDKLTTRLQDGWVESEITQVTVAKKSRQKKVVTQ

SEQ ID NO: 78437 - protein, 463 aa, Yersinia pestis
MIMIKRSISGRLALMFALASILIVSALGIVLRSSLHNSLQKQMHNELQFTESLMAPWILSRTTLDGWQTLATKFTDLAAAEGGRVQYWVLSDDPQLQVGGPAPRGVTWASLSKGFSKVPGATDESCSLFLLMSEIPAQGERPALRYVVAIDSTPYMGTLNEFTRTLIVITAIGVLFVALLGFVIARIGMRPVNKLSEQAQHLAPGNHGQRLDTLTLPDELQKLAVAFNGVLERQEIAWRQLESFNADVAHELRTPLTNLMGQTQLGLSRKRETHELEDLLESNLEELERMTSIVNDMLFLSHAQAGEHATQLTDVSLREETYKTTEYVEPSFAEKNLSIHVEGDITARIDRRLFHRSLANLLENSARHAVTGTTVKVTISRENNLASIAVANIGAPIAAEHLNRLFERFYRVDSSRARSDTHHGLGLSIVRAVAIMHRGDVFASSQNGINTFGLTLAITDPYI

SEQ ID NO: 78438 - protein, 363 aa, Yersinia pestis
MKHNAFKMTSVFKTTSVFKSTLLAAVISLSSGGAMSADYKLNPFTLTYDGAITENVKGKVNIHPVTYKLNGLEISANVYTPANYDPAKKYPAVVVAHPNGGVKEQVAGLYAQRLAEQGYITITADAAYQGASGGLPRNVDKPAYRIEDIHGMADFITQYPGVDTVRLGLLGICGGGGYSLKAGQTDKRFSAIATLSMFDSGLVRRNGYQDSQLSTIQERLKQASDARAQEAAGGEVTYVGDAKLTDEQIAKLPFDLYRQGFEYYGKTHAHPNSTFRYTASSLLDLMRFDAASNMDLIDKPLLMMAGSKADSLYMSETAFKGASNAKDKELFLIDGATHIETYWQPEYVNQAIGKLAQFYGKNL

SEQ ID NO: 78439 - protein, 495 aa, Yersinia pestis
MIPVIALVGRPNVGKSTLFNRLTHTRDALVADFPGLTRDRKYGRAEVEGHEFIVVDTGGIDGTEDGVETKMAGQSLLAIEEADIVLFMVDARAGLMPADQGIAQHLRSREKATFLVANKTDGIDPDTATADFYSLGLGEVHAIAASHGRGVTQLIEDVMAPYMDAEEPEVELTEEEENAAYWAEQEAQGEDVPPEDPEDDFDPRTLPIKLAIVGRPNVGKSTLTNRILGEDRVVVYDMPGTTRDSIYIPMTRDDREYILIDTAGVRKRGKITETVEKFSVIKTLQAIEDSNVVLLVIDARDGISDQDLSLLGFILNSGRSLVIAVNKWDGMTEEARAQVKDMLDLRLGFVDFARIHFISALHGSGVGNLFESVQEAYDCSTKRVGTSLLTRIMQMAEEDHQPPLVRGRRVKLKYAHAGGYNPPIVVIHGNQVTDLSDSYKRYLMNYFRRSLKVMGTPIRIQFKEGENPFAGKRNPLTPNQMRKRKRLMSHLKKGK

SEQ ID NO: 78440 - protein, 393 aa, Yersinia pestis
MQLRKTLLVGLVSVALLSGCSLFNSEEDVVTMSPLPKVENQFSPTKVWSTSVGSGVGDYYSHLRPAWQGTSVFAADRKGLVKAMDADTGKQIWQTDLSEKTNFLSSNHSAMLSGGVTASGSHVYVGSEKAVVYALNAYDGQVAWQTVVAGEALSRPVVSDGVVLIHTSNGMLQALNESDGAIKWTLNLDTPALSLRGESAPAVAFGAAIVGGDNGRVSAVMMEQGQLIWQQRISQVTGATEIDRLNDIDITPVVVDGVVYALAYNGNLTALDLRSGQILWKREIGSVNDFIVDAGRIYLVDQNDRIIALKSDGGVTLWSQSDLLHRNLTAPVMYNGYLVVGDAEGYLHWVNTDDGRFVAQQSVDSSGFLSAPVVASDKLLIQARSGTVYAFTR

SEQ ID NO: 78441 - protein, 1148 aa, Yersinia pestis
MSQQYRYSLPERRGDTRQLGQLTGSACAVECAEIIERHDGPVMLITPDMQTALRLRDEIQQFSPQPVSTLSDWETLPYDSFSPHQDIISARLSCLYHLPAMKRGVIILPINTLMQRVCPHEFLHGHALVMKKGQHLSRDKLRAQLEQAGYRSVEQVMEHGEFATRGALLDLYPMGSNEPYRIDFFDDDIDSLRVFDVDSQRTLVEVEQINLLPAHEFPIDKAAIELFRSQWREQFEVRRDNEHIYQQVSKGIWPAGIEYWQPLFFSQQLPTLFSYLPENTLLVNTGDLESSAERFWQDVNQRFESRRVDPMRPLLAPESLWLRVDALFNELKEWPRVQLKTEAQPAKAANTNLCYQPLPDLSVQAQQKAPLDNLRRFIESFHGSVVFSVESEGRRETLQDLLARIKLSPTLITTLSQAANPGHYLMVGASERGFLDTDKQLALICESDLLGERVSRRRQDNRRTINTDTLIRNLAELRPGQPVVHLEHGVGRYLGLTTLEAGGIKAEYLILTYAGEDKLYVPVSSLHLISRYSGGADDNAPLHRLGSDVWSRARQKAAEKVRDVAAELLDIYAQRAVKSGFKFKHDREQYQLFCQSFPFETTPDQEQAINAVLSDMCQPLAMDRLVCGDVGFGKTEVAMRAAFLAVTNNKQVAVLVPTTLLAQQHFDNFRDRFATWPVRIEMLSRFRSAKEQQVILEQAAEGKIDILIGTHKLLQSDLHWHDLGLLIVDEEHRFGVRHKERIKAMRADVDILTLTATPIPRTLNMAMSGMRDLSIIATPPARRLAVKTFVREYDSLVIREAILREILRGGQVYYLYNDVENIEKVTQKLAELVPEARITIGHGQMRERDLERVMNDFHHQRFNVLVCTTIIETGIDIPSANTIIIERADHLGLAQLHQLRGRVGRSHHQAYAYLLTPNPKAMSTDAKKRLEAIASLEDLGAGFALATHDLEIRGAGELLGEDQSGQMTTIGFSLYMELLESAVDALKEGREPSLEDLTSNQTEIEMRMPVLLPEDFISDVNIRLSFYKRIASARNETELDELKVELIDRFGKLPDPARYLLHTAELRQQAQKLGIKRIEGNERGGFIEFGENNKVDPVYLIGLLQRQPQIYRLEGPTKLKLVQDLSDRAQRLKFITELLAAFAQHRIA

SEQ ID NO: 78442 - protein, 400 aa, Yersinia pestis
MYQPVALFIGLRYMRGRASDRFGRFVSWLSTIGITLGVMALITVLSVMNGFERNLQDTILGLMPQALITTPQGSLDPNKIPASTLKSLSGVSDIVPLTTADVVLQSARNLAAGVMLGVDPQQHEPLANYLVNVDIKALAPGSYNIILGEKLAGQLGVKRGETLRLMVPSASQFTPMGRIPSQRVFNIIGTFAANSEVDGYQILVNQQDASRLMRYPLGNITGWRLFLSQPLSVDSLSQQSLPEGTVWKDWRDRKGELFQAVRMEKNMMGLLLSLIIAVAAFNIITSLGLLVMEKQGEVAILQTQGLSRRQIMLVFMVQGATAGVIGALLGAGLGVLLASQLNTLIPILGVLIDGATLPVEIDPLQVTVIALLAMVIALLSTLYPSWRAAAAQPAEALRYE

SEQ ID NO: 78443 - protein, 424 aa, Yersinia pestis
MAKNIQAIRGMNDYLPADTAIWQRIESILKQVLSGYGYSEIRMPIVEQTPLFKRAIGEVTDVVEKEMYTFDDRNGESLTLRPEGTAGCVRAGIEHGLLYNQEQRLWYIGPMFRYERPQKGRYRQFHQLGAEVFGLPGPDIDAELILLTARWWRALGIFEHVKLELNSIGSLAARADYREALVAFLEQHVEVLDEDCKRRMYSNPLRVLDSKNPDVQQLLDDAPKLSDYLDEESKQHFAGLCELLDKASIPYTVNERLVRGLDYYNRTVFEWVTHSLGAQGTVCAGGRYDGLVEQLGGRATPAVGFAMGLERLVLLVQAVNADFQVPATVDAYVISSGEGAQSAAMLLAESLRDALPTLKIMTNYGGGNVKKQFTRADKWGARVALMLGESEVAAQQVVVKDLRNGEQETLAQADVAARLALMLG

SEQ ID NO: 78444 - protein, 363 aa, Yersinia pestis
MGFKCGIVGLPNVGKSTLFNALTQAGIEAANFPFCTIEPNTGVVPMPDPRLDQLAEIVKPQRILPTTMEFVDIAGLVKGASKGEGLGNQFLTNIRETEAIGHVVRCFENDNIIHVAGKVDPADDIETINTELALSDLETCERAIHRVQKKAKGGDKDAKAELEALEKCLPHLENAGMLRALDLTAEDKAAIRYLSFLTLKPTMYIANVNEDGFENNPYLDQVRAIAAAEGSVVVAVCAAVESDIAEMEDEDRAEFMAELGIEEPGLNRVIRAGYELLNLQTYFTAGVKEVRAWTIPVGATAPQAAGKIHTDFEKGFIRAQTIAFDDFITYKGEQGAKEAGKMRSEGKEYIVKDGDVMNFLFNV

SEQ ID NO: 78445 - protein, 375 aa, Yersinia pestis
MHNGSPIIRRKSTRIYVGKVPIGDGAPIAVQSMTNTKTTDVDATVAQIKALERVGVDIVRVSIPTMDAAEAFKLIKQQSTVPLVADIHFDYRIALKVAEYGVDCLRINPGNIGNESRIREVVACARDYNIPIRIGINGGSLEKDIQEKYGEPTPEALLESAMRHVDILDRLNFDQFKVSVKASDVFLAVNSYRLLAKQINNPLHLGITEAGGARSGSVKSAIGLGLLLSEGIGDTLRISLAADPVEEVKVGFDILKSLRIRARGINFIACPTCSRQEFDVIGTVNALEQRLEDLITPMDVSIIGCVVNGPGEALVSTIGVTGARNHSGFYEDGVRQKERFDNKAMIDQLEAKIRAKASILDANNRIVINQLDDNK

SEQ ID NO: 78446 - protein, 345 aa, Yersinia pestis
MNTEASQDQTVTETPGVRLRQARESLGLTQQTVAERLCLKVSTIRDIEEDNAQANLASTFHRGYIRSYAKLVHLPEDELLPILEKQAPVRAAKVAPMQSFSLGKKHKKRDGWLMSFTWLIVLVVLGLTGAWWWQNHQAQQAEIANMVDQSSAQLSQNGGQPVPLTDDNSDAIAPTDAPAPVANGQPVPLTNHSGSAITNSATTSSVPKTTSTEPVDTANTNTTMHQEGAASAAVSPSQVPQPGMPTGQPPLPTADAGVSGSASSVGALVMNFTADCWLQVVDATGKTLFSGIQKGGAVLNLAGKAPYKLTIGAPGALTISYQGNPVDLSKFIKANRVARLTVCVE

SEQ ID NO: 78447 - protein, 315 aa, Yersinia pestis
MPDMKLFAGNATPELAQRIANRLYTSLGDAAVGRFSDGEVSVQINENVRGGDIFIIQSTCAPTNDNLMELVVMVDALRRASAGRITAVIPYFGYARQDRRVRSARVPITAKVVADFLSSVGVDRVLTVDLHAEQIQGFFDVPVDNVFGSPILLEDMLQQNLENPIVVSPDIGGVVRARAIAKLLNDTDMAIIDKRRPRANVSQVMHIIGDVAGRDCVLVDDMIDTGGTLCKAAEALKERGAKRVFAYATHPIFSGNAVDNIRNSVIDEVIVCDTIPLSAEIKALKNVRTLTLSGMLAEAIRRISNEESISAMFEH

SEQ ID NO: 78448 - protein, 651 aa, Yersinia pestis
MTHPSFIRLRFAFKLSFAIVAALFLGFHLQLETPRWSVLTAAIVSAGPAFAAGGEPFSGAIRHRGWLRIIGTFIGCIGGLVIIVLTIRAPVLTLMLCCLWAGICTWISSLVRVENSYAFGLAGYTALIIIVTTGETPLLTPQFAVERCSEIVLGIVCAVMADLLFSPRSIKQDIDRLVDKVLVDQYRLLQLCIQPAEKSEIDRAWNELVKNTTSLNGMRSYLMMESSRWQRCNRRLQVLHTESLALITQACETYLVMSNHPEVISAELKTMLSEPAQTPAEIHQQMKKLRQFIAASHSEAIPHTISSWVGAATRYLLLSKGIQTNSSINQVEEDILAGDAPVKPISAEGHHAMINGLRTGIATAIGGLFWLWTGWTSGAGCMVMIAVVTSLAMRTPNPRRMALDFLVGVIIALPIGALYFMFIIPSTQQSMLLLCISLGVLAFIIGIEVQKRRLGSLGTLASTINIIVLSNPMIFNVRQFLDSALGQIVGCFVSLIVLLLIRDNAKDRTGRTLLNRFVYSAVSALTTNKTKRGENHLPALYQQLNQLLMMFPADIDKYRLALTLIIAHQRLNRTEIPVNAELSAFHKQIRSTAERVITVNNDQKRRYYFARLLQELDQYQQKLVDYQAADAVIRPVKRLTEMLRKYQSALI

SEQ ID NO: 78449 - protein, 411 aa, Yersinia pestis
MDKLLDRFFNYVSFDTQAKANVKSVPSTQGQRKLAQALQQELLTLGFSHVTLSDHGCVMATLPANVSWPVPTIGFIAHLDTSPDFSGKNVNPQIVENYRGGDIALGIGDEVLSPVMFPVLHQLLGHTLITTDGKTLLGADDKAGIAEIITAMVRLKHRNVPHGDIRIAFTPDEEVGKGAQFFNVAEFDAQWAYTVDGGGIGELEFENFNAASVAIKIVGNNVHPGSAKGVMVNALSLATRYHQELPVDETPECTEGYDGFYHLQSIKGTVERAEMHYIVRDFNRDSFEARKKNMVDIAKRVGKGLHRDCYIEIVIDDSYYNMREQIIKHPHIIELAQQAMLDCDITPIMKPIRGGTDGAQLSFKGLPCPNIFTGGYNYHGKHEFITLEGMEKAVAVIMRISELTAKRAKES

SEQ ID NO: 78450 - protein, 182 aa, Yersinia pestis
MNKQPEDWLDDVPENKNDDDDEIIWVSKSEIKRDAEALKDLGTELVDLGKNALERIPLDEDLLAAIELAQKIKKEGRRRQLQLIGKMLRARDVEPIQTALDKLKNRHNQQISLFHKLETLRDRLIAEGDEAIPTVLELYPDADRQQLRSLVRNAQKEQAANKPPKSFRQIFSYLRELAEKKQ

SEQ ID NO: 78451 - protein, 1430 aa, Yersinia pestis
MSQIATTDTPAVTPIKSTLTGPFERNSAGTSFGSNVDVDVIDNTSTATRVIAETTPEAESTIGEATGQEGGNATAVIPPTTTPSEQEITEPEQPGLLDKIKDLLGLGEITQEQADALEKNVKTKVEKVDAQTAAKLALESAQAEAQKAAEDALYLKTENVSYQAFAQTEEKIKKEADEAKKKQDKTKEDAIKAVKVNNTPLVPGDKDIAEKVTKAVTDTTKVQGEKAVTLATKITDAKVAQEKKDANTEALAEIDGRLISVSNALIQATGTDKGPLDQKLKEAQQAKTEQDGKELASGGYKELFEEDKKTSGYFGIAENDNGSGQQEKLAEAKKNRDAYNKAAKKELDAIAKAQKAVEAIDAQIVKLKKDKGDIEQEQSTEKGKTGGLDIALSGANDAKDAAQGEFDTAKNAAELAETAAKAIEAAKITDKAVEDATAAYKEAADKAEQTKTALEAAEKAKEDADKLVVTNTGLLNDADQALEQLVTAQNNAQPTLDLPAIDVTIAPAKTQDVIEGTSAIATQVAGGTQNVAKGGKAIDSVITKDGIVNLAAGANAKGTEVTKGTLNNNGGVDTDTVVSTEGKLVLTGGSETAIATSTGAKVAEGGVVTAGDHSVIEKMISSGNVTASGNNTIVRDTTINDGKLSLAGTATANNTTFNGGIFSVEGDTAATKTNMTGGKFAVTGNAKIEETVVSAGDVSLADKATANNTTLTGGTFAAAGDTAVSATNMTGGTFTVAGDTAATKTKMTGGEFAVTGNAKIEDTVLNASDFSLADKATANNTTLTDGTFTVAGDAAVTATNMSGGKFAVKGKAKIKDTQLSAGNFTLAENATANDTTLNGGKFDVSNEATATNTTINNGLFTLKDGAHADSTTVNSGTFVMADQSTANGIQLVDSAFTLASGAKASGITKLTGGQAQVAGSLESLSLTGGRADFANSAKASGLLDISADSQIIMNRGADTAQANLNLAGRLELLASDVAQAVAQPVARAAMELSNARAVMPAPAMPVPAAAPVAHFALNDVVMTGGTVDMSNAKNAQLTMASLNGTGNFNLGSVMQSDSVAPLNVSGDANGDFIIAMNSSGQAPTNLNVVNTNGGDARFALANGPVALGNYMTNLAKDANGNFVLTADKSAMTPGTAGILAVANTTPVIFNAELSSIQQRLDKQSTETNQSGMWGSYLNNNFAVKGRAANFDQKLNGMTLGGDKATALADGVLSVGGFASYSSSDIKTDYQSKGKVDSHSFGAYAQYLANSGYYMNAVVKNNQFSQDVNITSINGSASGVSNFSGMGIALKAGKHFNFNEAYVSPYVAMSAFSSGKSNISLSNGMEAQSSSTRSAMGTLGVNAGYRFVMNNGAELKPYAIFAVDHEFAKNNQVTVNQEVFDNNLSGTRVNTGAGMNVNITPNLSVGSEVKLSSGKDIKTPVTINLNVGYSF

SEQ ID NO: 78452 - protein, 484 aa, Yersinia pestis
MLRKNNKPFSLRARFLMATAGVILALSLSYGMVAVVGYIVSFDKSTFRAHRGESNLFFSLAQWHNNKLSISVPPELELNVPSLVLIYDKDGNILWRQRHVPELESHIEKSWLQKPGFYELDTGTHISRMMMGDNPKAQDQLKKYDDTDDSALTHSVSVNTYAATSRLPQLTIVVVDTIPQELQRTDLVWNWFSYVLLANLLLVIPLLWLAAYWSLRPIKALASQISQLEKGEREQLDENPPRELQSLVRNLNILLMNERQRYTKYRTTLADLTHSLKTPLAVLQTTLRSLRTGKQTTIEEVEPIMLEQISRISQQIGYYLHRASMRSEHNVLGREIHSVPALLDSLYSALNKVYQRKGIALTLDISPEVTFLGEKNDFMEVMGNVLENACKYCLEFVEVTTLHSEKQLTIVVDDDGPGIPENKRQLIFQRGQRVDTLRPGQGLGLSIAAEIIEQYQGKISITESPLGGARMMVTFGQQQDCHDD

SEQ ID NO: 78453 - protein, 420 aa, Yersinia pestis
MTLLALGINHKTAPVSLRERVTFSPESMDQALNSLLQQPLVQGGVVLSTCNRTELYLSVEQQENLHEQLTAWLCNYHKLSPDDVRQSLYWHHGNDAVRHLMRVASGLDSQVLGEPQILGQVKKAFAESQRGQSLSSELERLFQKSFSVAKRVRTETEIGASAVSVAFAACSLARQIFESLSELHVLLVGAGETIELVARHLREHQVKHMIIANRTRERAQSLASEVGAEVITLPEIDARLADADIIISSTASPLPIIGKGMVERALKTRRNQPMLFIDIAVPRDIEPEVGKLSNAYLYSVDDLQAIIQHNMAQRQAAAVQAESIVQQESMNFMTWLRAQGAVETIRDYRSQAEQVRSEMTAKALVAIEQGANVEQVINELAYKLTNRLIHAPTKSLQQAASDGDMERLQLLRDSLGLDQH

SEQ ID NO: 78454 - protein, 360 aa, Yersinia pestis
MKSSIVAKLEALQERHEEVLAYLGDASVIADQDRFRALSREYAQLTDVTRCFKEWRSAQDDIEAAEMMLDDLEMREMAQEELKIAKARSEELEQQLQVLLLPKDPDDERDCFLEIRAGTGGDEAAIFAGDMFRMYSRYAETRRWKVEIMSASEGEHGGYKEIIAKISGDGVFGQLKFESGGHRVQRVPETESQGRIHTSACTVAVMPAIPEAELPEINAGDLRIDTFRSSGAGGQHVNTTDSAIRITHIPTGIVVECQDERSQHKNKAKAMSVLGARIRAAEMQKRQLAEASERRNLLGTGDRSDRNRTYNFPQGRVTDHRINLTLYRLDEVMEGKLDMLIQPIVQEYQADQLSALSEQD

SEQ ID NO: 78455 - protein, 456 aa, Yersinia pestis
MELSSLTAVSPIDGRYGDKVSALRPIFSEFGLLKFRVQVEVRWLQKLAACAEIKEVPAFDANANAYLDKIVQEFNEQDAQRIKTIERTTNHDVKAVEYFLKEKVENLPALHAVSEFIHFACTSEDINNLSHALMLQTARQDVLLPAWRQIIDSIKALAHQYRDLPLLSRTHGQPATPSTIGKELANVAYRMERQFRQLTQVEILGKINGAVGNYNAHIVAYPEVDWHQFSESFVTSLGINWNPYTTQIEPHDYIAELFDCVARFNTILIDFDRDIWGYIALNHFKQKTIAGEIGSSTMPHKVNPIDFENSEGNLGLSNAVLGHMASKLPVSRWQRDLTDSTVLRNLGVGLGYALIAYQATMKGISKLEVNEAHLLQELDHNWEVLAEPIQTIMRRYGIEKPYEKLKELTRGKRVDAAGMQAFIDGLDLPEEEKNRLKAMTPANYIGRATTMVDELK

SEQ ID NO: 78456 - protein, 371 aa, Yersinia pestis
MSDNSQKKVIVGMSGGVDSSVSAYLLQQQGYQVAGLFMKNWEEDDDEEYCSAATDLADAQAVCDKLGMELHTVNFAAEYWDNVFELFLAEYKAGRTPNPDILCNKEIKFKAFLEFAAEDLGADYIATGHYVRRQDVDGKSRLLRGLDGNKDQSYFLYTLSHEQIAQSLFPVGELEKPEVRRIAEQLDLVTAKKKDSTGICFIGERKFRDFLGRYLPAQPGPIMTVDGQLVGKHQGLMYHTLGQRKGLGIGGTKEGGDDPWYVVDKDLDSNTLLVAQGHEHPRLMSVGLVAQQLHWVDRQPVTAPFRCVVKTRYRQQDIPCTVTPLDDERVDVRFDDPVAAVTPGQSAVFYQGEICLGGGIIEQRYPLTNPA

SEQ ID NO: 78457 - protein, 330 aa, Yersinia pestis
MTNKIDWIDNLRAVACIMVVMIHSTTYYVTRGAQVGELNWDIANVLNSASRACVPLFFMISGYLFFGEKSAQKKHFMRIGLCLLFYSVIALIYISTLTPIDGWASLRNILQKPVFYHLWFFYAIIVVYLVSPLIKVKPVSGRYLAILILLLAVVANPQTSKFSLDDFRLLPANLYIYGDTFYYLLYALLGRAMGMLETQGRMISWGAALLFVVSVICIAISTEKQTRINGSFADTFYMYCSPLVFIAAVSLWVWFKNCLNQHIAWLSGLARHSLAIYGFHALIIHFIRTHHYDFTAYPVLDILYVFALTLGLSTLLSMGLQRIDRRRWVS

SEQ ID NO: 78458 - protein, 178 aa, Yersinia pestis
MIWRFGSMKHPFSTRLAAVQHYLSGKATLRETARQFSVGKSPLTRWIRAFRRQGEAGLEHHLSRTYTPEFRLCVVRYMMANRCSAADASAHFNIPNETIIQNWMKRYREGGKEALNPSKTGPTMPKDKYEHDSKPFSEMTHAELEKELEYLRAENAYLKKRKALREEKALREQQKKPE

SEQ ID NO: 78459 - protein, 261 aa, Yersinia pestis
MARSTYYYHASKPDGVIDDYADAVKAIGALSRRHAQRYGYRRMTVALRKEGFTLNHKTVRKLMNQHGLLSLIRRKKYRSYRADGGRASDNLLARNFTSEISGLKWCTDVTEFRVGAQKLYLSVIQDLFNNEIISWHMSERAALILTCKTLEKALKVKGRKEGLMLHSDQGWHYRTPMWRSMLVEAGIRQSMSRKGNCLDNAVMENFFSHLKAEMYHRKKYDSATVLKRDIVEYIHYYNTERISLKTGGMSPAEYRTQVEKQ

SEQ ID NO: 78460 - protein, 276 aa, Yersinia pestis
MNYQHWLSLAAARFTHSDSPKRDAEILLSFVTGKARTYLLAFGETEITAEQLLWLETLANRREQGEPIAYLVGEREFWSLPLSVSSATLIPRPDTECLVEQALARLPAMPCRILDLGTGTGAIALALATERRDCAVIAVDINADAVALARHNAEKLTIDNVCFLQGSWFEPVSGRFALIASNPPYIDANDPHLNEGDVRYEPHSALVAAAEGMADLAAIVSQAPGYLDPGGWLMLEHGWQQANAVQELLKNSGFSAVMTCKDYGNNDRVTLGQWAV

SEQ ID NO: 78461 - protein, 133 aa, Yersinia pestis
MWVDYIAMKYLHLLTVVISITLFVLRFFWKCRGSAMLEKRWVKITPHINDTLLFISGIVLILITGFYPFSPQGTWLTEKLFGVIIYILLGYVALGKRTRSQNIRWFAFILALGCLYLIVKLATTKLPLLMGYL

SEQ ID NO: 78462 - protein, 317 aa, Yersinia pestis
MSFPPPSIDDKHAIDDSPAADDNHTADDNSAADERHEHHHHDEHGEDLESLLKLAATASIHRTAFFRVLLDATVLVLVGDSEQGSDDGEMSFTTANGVNILHWEKQDGESVIPFFTSVEVLQQALEQTDGETIGSEKQPFVAMPVRVLFEMTQGAHLFLNPKSEYGKEFWPEEVAMLLKNGGLVQPAEMVVDKESQILLGQPEEYPSAMVDALIQLFSQRKPVRRAFLALMHDKSVDEKPNLLIGLEVDGTANEVDQLIQEAGNVASDHAPDGGPVDFCLVSEKERGVSHYLTTHTQAFYQRKWGSWLRNVIPSTNH

SEQ ID NO: 78463 - protein, 284 aa, Yersinia pestis
MKQKVVSIGDINVANDLPFVLFGGMNVLESRDLAMRICEHYVTVTQKLGIPYVFKASFDKANRSSIHSYRGPGLEEGMKIFQELKQQFGVKVITDVHEASQAQPVSEVVDVIQLPAFLARQTDLVEAMARTGAVINVKKPQFVSPGQMGNIVEKFKEAGNDQVILCDRGSNFGYDNLVVDMLGINVMVQATGGHPVIFDVTHALQCRDPFGAASGGRRAQVAELARAGMAVGLAGLFIEAHPEPNSAKCDGPSALPLDKLEPFLVQMKAIDDLVKSFPALDTSK

SEQ ID NO: 78464 - protein, 317 aa, Yersinia pestis
MQNRLTIKDIARMSGVGKSTVSRVLNNEGSVSPQTRERVEAVIRQHGFTPSKSARAMRGQSDKVVGIIVSRLDSPSENQAVRTMLPLFYQQGYDPILMESQFDTTLVSEHLHILQQRHVDGVILFGFSGLTAEMLAPWQEKMVVLAREYRGFSSVCYDDEGAIYLLMDKLRQAGHRHISYIGVQSSDATTGMRRYQAYLDYSQQHGLTPMVALGELSYQSGFQLAPQVITPQTSALVCASDTIAMGVSKYLQQQEREQPPIQVCGIGNTPLLHFLFPDTLTIELGYGRAGVKAAQQLLDQLSNSQPIQQIIIPGQLV

SEQ ID NO: 78465 - protein, 309 aa, Yersinia pestis
MSIRIVPKDQLGKQREKGTTAGNIPPLLFANLKSLYTRRTERLQQLALDNPLADYLDFAAKITEAQQKALHDHPLVLDMQAELVQSAASGKPPLDGSVFPRTEHWRKLLSALIAELRHDAPDHILAVLDNLDKASVHELELYADALLNRDFSQVGSEKAPFIWAALSLYWAQMASQIPGKARAEYGEHRQFCPVCGSIPVSSVVHIGTHNGLRYLHCNLCESEWHVVRIKCSNCEQTRDLNYWSLDSELAAVKAESCGDCGTYLKILYQEKDPQVEAVADDLASLILDAKMEGEGFARSSINPFLFPGE

SEQ ID NO: 78466 - protein, 224 aa, Yersinia pestis
MKKEKPIQRYSAPERINHWIVAFCFILAAISGLGFFFPSFNWLMNIFGTPQMARILHPFAGVVMFAAFLIMFFRYWKHNLINKDDLEWAKNIHKIAMNEEVGDTGRYNFGQKCVFWAAIISLVLLLVSGVVIWRPYFASSFPIPLIRLALLVHSLAAVGLIIVIMVHVYAALWVKGTITAMVEGWVPAAWAKKHHPRWYREVRSKDDARANAKGQPQEKQKEKP

SEQ ID NO: 78467 - protein, 164 aa, Yersinia pestis
MRLTSKGRYAVTAMLDVALHSQDGPVPLADISERQGISLSYLEQLFSRLRKNGLVASVRGPGGGYLLGKDASAIAVGAVITAVDESVDATRCQGKEGCQGGNRCLTHTLWRDLSERISSFLNNITLAELVNNQDILEVADRQNNDTRRTANGRPQETINVNLRA

SEQ ID NO: 78468 - protein, 104 aa, Yersinia pestis
VRYMMANRCSAADASAHFNIPNETIIQNWMKRYREGGKEALNPSKTGPTMPKDKYEHDSKPFSEMTHAELEKELEYLRAENAYLKKRKALREEKALREQQKKPE

SEQ ID NO: 78469 - protein, 261 aa, Yersinia pestis; identical to SEQ ID NO: 78459

SEQ ID NO: 78470 - protein, 340 aa, Yersinia pestis
MSVVIAPIPRPKQRHWLINLWPLLLFLLILASAGYVSWLYWPELLFKTVAWQKSVHQQMAQLLQQVKVEPHQAGWVLMLFSLIYGVLHAVGPGHGKVVIVTYLATHPARLKSSLKLTFAASILQGSVAILLVTLLLGVWQLSSRYLHQSSFWLEKGSFLLVIGLGMLLCFRAVKRIYRQINALKPQKMTFQQIQPLPANHVHSDNCGCGHRHLPSDKELQAGGDWRTRLTIVLAMGMRPCSGAIMVLLFSKVIGVYWWGILSAMAMALGTSLTISLLALFVHYARRLAVYLSRKRAPAAWGEIAWATLALTGGIILLFAGVLFYLSSQPEMVGAVRPFGR

SEQ ID NO: 78471 - protein, 184 aa, Yersinia pestis
MIEKKQAFENRVLEHLNAGKTVRSFLMAAVDLLAEALNILVVQIFRKDDYAVKYAVEPLLVGDGPLSELSVRLKLVYALGVITRHEYEDAELLMALREELNHDGTEYRFTDDEILGPFGELHCVDELPPVPTFLRPDEADASLIAMQRQRYQQMVRSTMVLSITELLSRISVKQVSKLSPLSQG

SEQ ID NO: 78472 - protein, 387 aa, Yersinia pestis
MKALHFGAGNIGRGFIGKLLADAGAQLTFADVNQPLLDELNKRKRYQVNVVGEQARVEEVKNVSAVNSGSPEVVALIAEADIVTTAVGPQILARIAATVAQGLITRHQQGNTRPLNIIACENMVRGTSQLKQHVFAALSEDEQIWVEQHVGFVDSAVDRIVPPSEAGSTDILAVTVETFSEWIVDGTQFKGQPPEIVGMELTDNLMAFVERKLFTLNTGHAITAYLGQLAGHQTIRDAILDPAVRQTVKGAMEESGAVLIKRYAFDPQKHAAYINKILSRFENPYLHDDVERVGRQPLRKLSAGDRLIKPLLGTLEYQLPHDSLVTGIAAAMSYRSEQDPQAQELVTLLAQLGPKAALAQISGLPADSEVVEQAVSVYNAMQQKLAH

SEQ ID NO: 78473 - protein, 423 aa, Yersinia pestis
MITLRKLPIALAVAAGVLSTQAMAVDFHGYARSGIGWTASGGEQQCFQTTGAQSKYRLGNECETYAELKLGQELWKEGDKSFYLDTNVAYSVSQRDDWESTDPAFREANVQGKNLIESLPGSTIWAGKRFYQRHDVHMIDFYYWDISGPGAGLETIDLGFGKLSVAATRNSESGGSSAWIDNQRENAKYTINNVYDVRLAGLETNPGGSLELGVDYGRADTQEGYSLAPNASKDGVMLTAEHTQSLMGGFNKFVVQYATDSMTSYNTGHSQGTSVNNNGHLLRVIDHGAINLAEKWDMMYVALYQDIDLDNNNGNTWYSVGVRPMYKWTPIMSTLLEAGYDNVKSQHTGERNGQYKLTLAQQWQAGDSIWSRPAIRVFATYANWDEKWGYSDTTGVAQDGTIGTNSRGKNNEVTFGAQFEAWW

SEQ ID NO: 78474 - protein, 369 aa, Yersinia pestis
MANVTLSSVYKAFGEAVISRDINLEIDDGEFVVFVGPSGCGKSTLLRMIAGLEDITSGELLIGGKRMNEVPPSERGIGMVFQSYALYPHLSVAENMSFGLKLAGVKKAEIYQRVNQVAEVLQLAHLLDRRPKALSGGQRQRVAIGRTLVSEPDVFLLDEPLSNLDAALRVQMRIEISRLHKRLERTMIYVTHDQVEAMTLADKIVVLDAGNIAQVGKPLELYHYPANRFVAGFIGSPKMNFLPVKVTAAEPRQVQIELPNHQRVWLPVEGDQVQVGANMSLGIRPEHLLPSSASEVTLEGEIQVVEQLGNETQIHIQIPAIRQNLVYRQNDVVLVEEGATFSIGLPPHRCHLFREDGTACKRLYQELGV

SEQ ID NO: 78475 - protein, 417 aa, Yersinia pestis
MLKREMNIADYDADLWRAMEQEVVRQEEHIELIASENYTSPRVMQAQGSQLTNKYAEGYPGKRYYGGCEYVDVVEQLAIDRAKALFGADYANVQPHSGSQANVAVYSALLKPGDTVLGMNLAHGGHLTHGSPVNFSGKLYNIVPYGIDESGQIDYEDLARQAEIHKPKMIIGGFSAYSGIVDWAKMREIADSIDAWFFVDMAHVAGLVAAGVYPNPVPHAHIVTTTTHKTLAGPRGGLILAKGGDEDLYKKLNSSVFPGNQGGPLMHVIAGKAVALKEAMEPEFKIYQQQVAKNAKAMVAVFLERGYKVVSGGTDNHLFLLDLVDKDITGKDADAALGRANITVNKNSVPNDPKSPFVTSGVRIGSPAITRRGFKEAESRELAGWMCDVLDNINDEATIERVKQKVLAICARLPVYA

SEQ ID NO: 78476 - protein, 403 aa, Yersinia pestis
MTRSFTKSGIGKTARVLALSALTTLVLSSSAFAKIEEGKLVIWINGDKGYNGLAEVGKKFEKDTGIKVTIEHPDKLEEKFPQVAATGDGPDIIFWAHDRFGGYAQSGLLAELTPSKAFQEKLFPFTWDAVRFNGKLIGYPVAVEALSLIYNKDLVKEAPKTWEEIPALDKTLRANGKSAIMWNLQEPYFTWPVIAADGGYAFKFENGVYDAKNVGVNNAGAQAGLQFIVDLVKNKHINADTDYSIAEAAFNKGETAMTINGPWAWSNIDKSKINYGVTLLPTFHGQPSKPFVGVLTAGINAASPNKELATEFLENYLITDQGLAEVNKDKPLGAVALKSFQEQLAKDPRIAATMDNATNGEIMPNIPQMAAFWYATRSAVLNAITGRQTVEAALNDAATRITK

SEQ ID NO: 78477 - protein, 104 aa, Yersinia pestis
MIRKAFVMAVNPDAHAEYQRRHTPIWPELESVLKAHGAHHYSIFLDETRNLLFGVVEIESEERWNAVAQTAECQRWWQHMADVMPSHPDNSPVSQALREVFYLE

SEQ ID NO: 78478 - protein, 187 aa, Yersinia pestis
MKKLMWGAAALVVTATLVGCNQLTQYTLSEQELNEYLQKHNNYEKQIGIPGLVDANITLTQLQSQIGRAEPGKVTLTGNAKVDISSILGPQTADMTLTLKAQPTFDREKGAIYLKDMELTDYTVKPEKMDSVMKALTPYLNQSLKSYFNQQPAYVLDGEKSKAEAMAKKLAKGLEVKPGQLVIPLTD

SEQ ID NO: 78479 - protein, 540 aa, Yersinia pestis
MSRSLSIALAQLNWLVGDIEGNTERMLQTLNEQQKAGADLVMFSELALSGYPPEDLLYRDDFYQRCEVQLERLQAATPHIAVLVGHPWREGDKLYNALSLFAQGKLLGRYFKQQLPNYGVFDEKRYFSAGHQSCVVELKGYRLGLLICEDLWLDGPIDAVKAAGAEVVLSINASPYNREKPYIRKTLMAAHCQRTGLPLVYLNQIGGQDELIFDGCSKVFDAAGNMTHRLAAFAEQTTLLQLNECNVIPMTAPVAELPPLAQVYEALVLAVRDYVTKNGFNGAVLGLSGGIDSALTLAIAVDALGKDKVQALMMPFRYTADISIADAKEEAEILGVKFDVMSIEPMFDAFMGQLAPMFADTGRDTTEENLQARCRGVVLMALSNKRRSIVLTTGNKSEMAVGYATLYGDMAGGFDVLKDVPKTLVFKLAEYRNTVSYVIPQRVITRPPSAELAPDQKDEDSLPPYDILDAILEGYVEQDKSVAELVADGFDEAIVRKVIRLVDINEYKRRQSAVGPRITARSFGKDRRYPITSGFGRKNW

SEQ ID NO: 78480 - protein, 548 aa, Yersinia pestis
MKNINPSQTAAWKALQQHFEQMKDVTISSLFAKDDQRFNRFSATFDDQMLVDFSKNRITSETLEKLQDLAKETDLAGAIKSMFSGEKINRTEDRAVLHIALRNRSNTPIVVDGKDVMPEVNAVLAKMKQFCDRVISGDWKGYTGKAITDVVNIGIGGSDLGPYMVTEALRPYKNHLNMHFVSNVDGTHIAEALKPLNPETTLFLVASKTFTTQETMTNAHSARDWFLSAAGDPAHVAKHFAALSTNAKAVGEFGIDTNNMFEFWDWVGGRYSLWSAIGLSIALSVGFEHFEQLLSGAHAMDKHFAETPAEKNLPVLLALIGIWYNNFFGAETEAILPYDQYMHRFPAYFQQGNMESNGKYVDRNGHPVDYQTGPIIWGEPGTNGQHAFYQLIHQGTKLIPCDFIAPAISHNPLSDHHAKLLSNFFAQTEALAFGKSLEDVEAEFAAAGKTPEQVAHVAPFKVFEGNRPTNSILLREITPFSLGALIALYEHKIFTQGVILNIYTFDQWGVELGKQLANRILPELADDQEVTSHDSSTNALINRFKNWR

SEQ ID NO: 78481 - protein, 418 aa, Yersinia pestis
MTNSIEQAWDLAKQRFAAVGVDVDAALTRLDTLPVSMHCWQGDDVTGFEDPDGVLTGGIQATGNYPGKARNATELRSDLELALALIPGPKRLNLHAIYLESDTPVARNKIEPRHFSHWVAWAKKHQLGLDFNPSCFSHPLSADGFTLSHADPEIRQFWIEHCQASRRVSAYFGEQLGTPSVMNIWIPDGMKDTPIDRLAPRQRLLSALDEVISEKLNPAHHIDAVESKLFGIGAESYTVGSNEFYMGYAASRQTALCLDAGHFHPTEVISDKISSAMLYVPRLLLHVSRPVRWDSDHVVLLDDETQAIASEIIRHNLFDRVHIGLDFFDASINRIAAWVIGTRNMKKALLRALLEPTDRLRQLELRGDYTARLALLEEQKSLPWQAIWEGYCQRNDVPVDARWLDAVREYEQQILSQR

SEQ ID NO: 78482 - protein, 689 aa, Yersinia pestis
MTQQTFLVEIGTEELPPKALRSLAESFAANFTAELDNANLSHGEVSWYAAPRRLAVKVANLSAAQADREVEKRGPAIAQAFDAEGKPSKAAEGWARGCGITVDQAERLVTDKGEWLLYRAHVKGQPAQLLLAGMVNTALSKLPIPKLMRWGDKETQFVRPVHTVTLLLGTEVIPGTVLGINSDRVIRGHRFMGEAEFTIDSADQYPQILLERGKVIADYELRKSIIKRDAEQAAQQIGGVADLSESLLEEVASLVEWPVVLTAKFEEKFLAVPAEALVYTMKGDQKYFPVYDTAGHLMPHFIFVANIESKDPQQIISGNEKVVRPRLADAEFFFKTDRKKRLEDNLPRLETVLFQQQLGTLRDKTDRIQALAGWVAAQIGADVNHATRAGLLSKCDLMTNMVFEFTDTQGVMGMHYARHDGEAEDVAVALNEQYQPRFAGDDLPSNPVACALAIADKMDTLAGIFGIGQHPKGDKDPFALRRAALGVLRIIVEKNLSLDLQTLTEEAVRLYGSKLTNAKVVDDVIEFMLGRFRAWYQDEGHSVDTIQAVLARRPTKPADFDARVKAVTYFRTLDAAAALAAANKRVSNILAKSTDTLNDHVHASILKEPAELKLATHLVVLRDQLEPVFAAGQYKEALVELAALRETVDEFFESVMVMAEDDAVRVNRLTLLSKLRELFLQVADISLLQ

SEQ ID NO: 78483 - protein, 304 aa, Yersinia pestis
MQKFDTKTFQGLILTLQDYWARQGCTIVQPLDMEVGAGTSHPMTCLRAIGPEPIAAAYVQPSRRPTDGRYGENPNRLQHYYQFQVIIKPSPDNIQELYLGSLKELGLDPTIHDIRFVEDNWENPTLGAWGLGWEVWLNGMEVTQFTYFQQVGGLECKPVTGEITYGLERLAMYIQGVDSVYDLIWCDGPLGTTTYGDIYHQNEVEQSTYNFEYADVDFLFSCFEQYEKEAQSLLALETPLPLPAYERILKAGHTFNLLDARKAISVTERQRYILRIRTLTKAVAEAYYASREALGFPMCKKNQN

SEQ ID NO: 78484 - protein, 483 aa, Yersinia pestis
MIGNEMISLKRWRLFPRSLRQLVLMAFLLVLLPLLVLAYQAYQSLDHLSTQAADINRTTLADARRSEAMTSVALEMERSYRQYCVLDDATLATLYQHQRKQYTQMLVAHAPILPDARYYQTLQGLLNQLTDIKCKNSGPDKEASILLEQFSRSNAEMVQATRDVIFSRGQQLQKDIAERGQFFGWQSLLLFLVSVLLVVLFTRMIIGPVKGIERMINRLGEGRSLGNTALFKGPRELRSLAQRIIWLSERLAWLESQRHEFLRHISHELKTPLASMREGTELLADEVAGPLTQDQQEVVAILDHSSRHLQQLIEQLLDYNRKLADGPGEPEHVDLAEMVGNVISAHSLPARAKMIRTETELDARICWAEPTLLMRVLDNLYSNAVHYGEESGTIWICSRQVNDRVQIDVANTGAPIPTSEEIMIFEPFFQGSHQRKGAVKGSGLGLSIAQDCIRRMQGDLQLVTVDYAAVCFRIELPLTAENE

SEQ ID NO: 78485 - protein, 536 aa, Yersinia pestis
MKHNLNAHEARVIGCLLEKQVTTPEQYPMSLNGLTLACNQKTSRDPVMELSESQVQQTLDFLLKKHLIRSQSGNRVMKYEHRFCNSEFGDLKFSPAEVAVITLLLLRGAQTPGELRTRTNRMYEFADVAETEETLKTLSLREDGPFVVRLAREPGKRESRFMPLFSGDVASSLLAAGEAEENNHTLEANPRETHSFENIALEKTALEARVAQLEQQVIQLSRRLDDVLIQLDDMKKLRVGIVGLGGIAQKAYLPILTQAQGWQLVGAFSPNQAKAQPLCDSYRMRYFSRLDTLAAASDAVFVHSSTASHFQVVHDLLQAGVHVYVDKPLAETREQSEQLIELADKQHLALMVGFNRRFAPLYQQLKQQASSPVSLRMEKHRLSSIGPHDLGFTLLDDYLHVVDTALWLGGEGARLTGGAVQTNAQGQMLYAEHHFQQGGCLITTSMHRQAGTQRESVQVISDGACYHITDMRQWQQASAGQVISQPAPGWQTTLEQRGFTGAVHHFIEAVSNQTRPQVSGEDAIVAQRMIERILQQ

SEQ ID NO: 78486 - protein, 511 aa, Yersinia pestis
MNLLKSLAAVSSMTMFSRVLGFARDAIVARVFGAGMATDAFFVAFKLPNLLRRIFAEGAFSQAFVPILAEYKSQQGEEATRTLVAYVSGLLTLILAVVTVAGMLAAPWVIFISAPGFTDTPDKFALTSALLRVTFPYILLISLASLVGAILNTWNRFSIPAFAPTLLNVSMIGFALFAAPHFNPPVMALAWAVVVGGVLQLGYQLPHLKKIGMLVLPRLSLRDTGVWRVMRQMGPAILGVSVSQISLIINTIFASFLVSGSVSWMYYADRLMEFPSGVLGGALGTILLPSLAKSFSSANHDEYSRLMDWGLRLCFLLALPSAVALGILAKPLIVSLFQYGKFSAFDTLMTQRALVAYSVGLMGLIVVKVLAPGFYSRQNIKTPVKIAIITLILTQVMNLIFIGPFKHAGLSLSIGLGACLNASLLYWQLRKQKIFQPQPGWAIFLTKLVIGVIAMSAVLLGLLWVMPDWDVGGMAYRLLRLSAVVVAGAFAYFAMLALLGFKVRDFARRTG

SEQ ID NO: 78487 - protein, 1296 aa, Yersinia pestis
MEILRGSPALSAFRITKLLSRCQDAHLLVSDIYAEYVHFADVSAPLSADEHARLQRLLQYGPSLPEHPPAGRLLLVTPRPGTISPWSSKATDIAHNCGLSQILRLERGLAFSIQGPDLNESQWKQLAALLHDRMMEAVFTDLQQAEQLFSHHQPAPVQRVDILGQGRSALEQANIKLGLALAQDEIDYLLTAFTGLGRNPTDIELYMFAQANSEHCRHKIFNADWVIDGVVQPKTLFKMIKNTFEHTPDYVLSAYKDNAAVMEGSQVGRFYATAEKGIYDYHQEEAHILMKVETHNHPTAISPWPGAATGSGGEIRDEGATGRGAKPKAGLVGFSVSNLRIPGFEQPWEENFGKPDRIVTALDIMTEGPLGGAAFNNEFGRPALLGYFRTYEERVNSHNGIELRGYHKPIMLAGGLGNIRADHVQKGEITVGAKLVVLGGPSMNIGLGGGAASSMASGQSDADLDFASVQRDNPEMERRCQEVIDRCWQLGEYNPILFIHDVGAGGLSNAMPELVNDGGRGGRFELRDILNDEPGMSPLEVWCNESQERYVLAVAPAQMALFDEICRRERAPYAVIGEATEEKHLLLNDRHFGNQPIDMPLDVLLGKTPKMLRDVTRLQAKGDALQRADISLAEAVKRIMHLPAVAEKTFLITIGDRTVTGMVTRDQMVGPWQIPVADCAVTSASLDSYYGEAMSLGERAPVALLDFAASARLAVGEALTNIAATQIGELKRIKLSANWMSAAGHPGEDAGLYDAVRAVGEELCPALEITIPVGKDSMSMKTRWQEGHEQREMTSPLSLVITAFARIEDVRRTVTPQLRTDKGDNALLLIDLGAGHNALGATALTQVYRQLGDKPADVRNVQQLAGFFNAMQRLVADQHLLAYHDRSDGGLLVTLAEMAFAGHCGVTVDIQSLGNDALAALFNEELGAVIQVRAEQRADVEKLLADHGLANCVHYLGRAVAGDTFDIRSGTDVVYSEKRSTLRLWWAETSWQMQRLRDNPDCADQEHQAKQDESDPGLNVKLTFDPAEDIAAPFILKQARPKVAVLREQGVNSHVEMAAAFHRAGFDAVDVHMSDLLAGRTDLQSFQTLVACGGFSYGDVLGAGEGWAKSILFNDRVRDEFEAFFHRPTTLALGVCNGCQMMSNLRELIPGAEHWPRFVRNLSDSFEARFSLVEVASSPSLFMQDMVGSRMPIAVSHGEGQVEVRDAAHLAALEQSHLVALRFVNNHGVVTEQYPANPNGSANGITAVTSVSGRATVMMPHPERVFRTVSNSWHPEEWGEDSPWMRMFRNARKQLG

SEQ ID NO: 78488 - protein, 421 aa, Yersinia pestis
MKFSLFGDKFTRYAGITRLMDDLNDGLRTPGSIMLGGGNPAHIPEMDTYFQQLCQEMLTEGKLTEALCNYDGPQGKDLLLKALAKMLRDELGWQIEPQNIALTNGSQSAFFYLFNLFAGRYADGSRRRVLFPLAPEYLGYADAGLDEDLFVSAKPNIELLPEGQFKYHVDFEHLNITDDIGLICVSRPTNPTGNVITDEELIRLDAIAQQRNIPLLIDNAYGVPFPGIIFTDATPLWNPNIILCMSLSKLGLPGSRCGIVIADEKVISAITNMNGIISLSPGGMGPAIAAEMIERGDLLRLSNEVIRPFYFERVQQTIAILRKYLPAERCLIHKPEGAIFLWLWFKDLPISTELLYQRLKKRGVLMVPGHYFFPGLGYDWPHTHQCMRMNYVPAPEMIEKGVAILAEEIERAFQEAKQLTD

SEQ ID NO: 78489 - protein, 486 aa, Yersinia pestis
MTRIKLSYFTIGLVALLLALALWPNIPWRNGQEGQLDQIKARGELRVSTISSPLIYSTEKDTPSGFDYELAKRFADYLGVKLVIIPHHNIDDLFDALDNDDTDLLAAGLIYNRERLNRARTGPAYYSVSQQLVYRLGSPRPKSFSDLKGQVVVASGSAHMTTLKRLKQTKYPELNWSSSVDKSGKELLEQVAEGKLDYTLGDSATIALLQRIHPQLAVAFDVTDEEPVTWYFKQSDDDSLYAAMLDFYSEMVEDGSLARLEEKYLGHVGSFDYVDTKTFLSAIDNVLPSYQHLFEKHAGDIDWKLLAVIAYQESHWNPQATSPTGVRGLMMLTRATADGLGVKDRVDPEESIRGGAIYLQRLMKKLPETIPEDERIWFALAAYNLGYGHMLDARRLTKNQNGNPDSWVDVKMRLPMLSQKRYYPSTTYGYARGHEAYNYVENIRRYQVSLVGYLQEKEKKAAQHAAIEAELGKSNPVVGPGWSIGD

SEQ ID NO: 78490 - protein, 576 aa, Yersinia pestis
MNIQALLSDKVSQALIAAGAPADCEAQVRQSAKAQFGDYQANGVMAVAKKLGMQPRQLAERVVELLDLTGIASKIEIAGPGFINIFLDRQWVAEKVEYALTAPKLGVAPVEPQTIVVDYSAPNVAKQMHVGHLRSTIIGDAAVRTLAFLGHNVIRANHVGDWGTQFGMLIAYLEKMQNENASDMGLSDLELFYQQAKKTYDEDEEFALRARAYVVKLQSGDEYCRQMWRKLVDITMAQNQVAYDRLNVTLTKDDVMGESLYNAMLPEIVADLKAKGLAVESEGATVVYLDEYKNKDGEPMGVIIQKKDGGYLYTTTDIACAKYRYETLGADRILYYIDSRQHQHLMQAWTIVRKAGYVPESVPLEHHMFGMMLGKDGKPFKTRSGGTVKLSDLLDEAVERAGKLIAEKNPDMPADELKQVINAVGIGAVKYADLSKSRTTDYIFDWDNMLALDGNTAPYMQYAYTRVVSVFRRAGVDETSLTLPLVVTEDREATLATRLLQFEEIITTVAREGTPHVMCSYLYDLAGLFSSFYEHCQILNAESEEIRQSRLKLAMLTAKTLKQGLDTLGIQTVERM

SEQ ID NO: 78491 - protein, 191 aa, Yersinia pestis
MQREQVLSNALNLLEQQGLANTTLEMLAKALSVEVSDLTRFWPDREALLYDCLRYHSQQIDTWRRQLQLDETLSPQQKLLARYQTLSEQVQNQRYPGCLFIAACSFYPDTEHPIHQLAEQQKQASLHYTKALLQEMDADDADMVAQQMELILEGCLSKLLIKRQLADVEVAKCLAEDILTVAQCRKNGALS

SEQ ID NO: 78492 - protein, 295 aa, Yersinia pestis
MSLGALISESRNPATMELDKLSTLAMLTCINDEDRKVPDAIRLVLPAVAQAVDLAADALKQGGRLIYLGAGTSGRLGVLDASECPPTFGVPHGMVIGLIAGGPGALLKAVEGAEDDIALGMRDLQDLQLTATDMVVGLAASGRTPYVIGALRYARELGCPTAAISCNPDSPIAQEAQVAISPVVGPEALTGSTRMKSGTAQKLVLNMLSTGAMVKLGKVYQNLMVDVKATNVKLVDRACRIVVEATGVSRAEAEHALRQTDFEVKPAILMLLKGVSAEQARQDLRQHHGYLRAAL

SEQ ID NO: 78493 - protein, 279 aa, Yersinia pestis
MSSLLRIRQIYSTLAQNDRKLADFLLINPEQARHLSSQKLAQQTGVSQSAVVKFAQKLGYKGFPALKLALSEVVAMPKAVTLHNQILSTDSLKTIGEKLLNEKTAALRATLDINSEQRLIQGLGMLRAAQKVLLIGIGASGLVAKDLAYKLLKIGIVAISETDMHVQLAAAQALGEQGLLLAISFSGERREINLAAEEAQYCGTKVLALTRFSPNSLQQRADHCLYTISEEPVIRSAAISSSTAQYALTDLLFMAMIQQDIENAQDHIKHSAALIKKLI

SEQ ID NO: 78494 - protein, 715 aa, Yersinia pestis
MKKILTVCPYCGSGCKLNLLVEDGEIVGAEPADGVTNQGALCLKGYYGWDFLNDTRLLTPRLTTPLLRRQRGEAFQPVSWEAAIAFITAKLSAIKERHGPDAIMMTGSSRGPGNEANYVMQKFARAAIGTNNIDCCARLCHGPSVAGLQQTLGNGAMSNSIGEIENTDCILVFGYNAADSHPIVARRILKAKNKGAKLIVCDPRHIETARIADQWLPLKNGANMALVNAFIHVLIEEKLYDANYVRDHTRGFDELKAGVAAYRPEDVEPITGLSAKAVRQAMRTYAAAPAATLLWGMGVTQWGQAVDVVKGLSSLALLTGNLGRPNVGVGPVRGQNNVQGACDMGVLPNTFPGYEKVTDSEARARFAHAWGVAELPAHVGYSITDVPHKVAEGKLKAYYVFGEDPIQTEPDLAAMRAAFAALDLVVVQDIFMTKTAELADVVLPATSWGEHEGVYTSADRGFQHFNKAIEPKGDVKPDWEIISLISTAMGYPMAYQNTQQIWDEMRGLCPPFAGVTYEKLAGLGYVQWPCPTEDHPGTPYLYTDNQFATADGKGLLSCAPWQPPHEQTDSDYPLALCTVREVGHYSCRSMTGNCGTLKILADEPGYVQIHPEDASYLGVIDQALIWISSRRGKVIARASVTERANRGAVYMTYQWWIGACNELTVDHVDPVSKTPEFKHCAVKVEAISDQTAAEQYVEQQYSQLKKRLSDAAVVP

SEQ ID NO: 78495 - protein, 154 aa, Yersinia pestis
MRNYDLSPLLRQWIGFDKLASTMQGGQEPQGFPPYNIEKTDDNHYRISLALAGFKQSELDIEVEGPRLTVRGKPTPVEKQVEYLHQGLVRKEFSLTFTLAEHLNVDNAQFENGLLHIDLLRQVPEALQPQRIAIGSATPQERQVLESPEAPDQQ

SEQ ID NO: 78496 - protein, 238 aa, Yersinia pestis
MLRVIIVDDEQPAREDLRERLNEEHGIEIVAECSNALEAIPAIQRLQPDVVFLDIQMPRINGLELASMLNPESMPHIVFVTAYDEYAIRAFEEHAFDYLLKPLDHQRLAKTLTRLSRDLIVKNNLHKVIKPILRHIPCSGHNRIFLLKIEEVEYLSSELSGVHVVGTVQSGYTQLSLKTLEEKTPFIRCHRQYMVNTEQLGEIQLMDNGAAEVITRSGKHIPVSRRYLKSLKEKLGIA

SEQ ID NO: 78497 - protein, 86 aa, Yersinia pestis
MALLITKRCINCDMCEPECPNEAISMGAEIYQIDPMRCTECVGHYETPTCQLVCPIDNTISADPAWVETNEQLWDKFVQLHHADRL

SEQ ID NO: 78498 - protein, 126 aa, Yersinia pestis
MAILGLGTDIVEISRIQAVVERTGERLARRILSPSEWQHYQQHQQPVRFLAKRFAVKEAAAKAFGTGIRNGLAFNQFEVVNDALGKPTLRLHSRAAELAVELGVKSLHVTLADERRYACATVIIES

SEQ ID NO: 78499 - protein, 115 aa, Yersinia pestis
MSNIIKQIEQEQMKQDVPAFRPGDSVEVKVWVVEGSKKRLQAFEGVVIAIRNRGLHSAFTVRKISNGEGVERVFQTHSPVIDSITVKRRGAVRQAKLYYLRERTGKSARIKERLG

SEQ ID NO: 78500 - protein, 598 aa, Yersinia pestis
MRTEYCGQLNLSHVGQSVTLCGWVNRRRDLGGLIFIDMRDREGIVQVFFDPDHKAAFEQASELRNEFCIQITGTVRARPDSQINKDMSTGEVEIFANTLNIINRSEPLPLDSNQINSEEQRLKYRYLDLRRPEMADRLKSRAKITSFVRRFMDDHGFLDIETPMLTKATPEGARDYLVPSRVHKGKFYALPQSPQLFKQLLMMSGFDRYYQIVKCFRDEDLRADRQPEFTQIDVETSFMSADQVREVMEKLVRELWQETKGVDLGDFPVMTFAEAMRRYGSDKPDLRNPLELVDVASLVKDVEFKVFSGPANDAKGRVAALRVPGGAQLSRKQIDEYGQFVGIYGAKGLAWLKVNDRAAGLEGVQSPIAKFLSAEVLDAILVATQAESGDILFFGADSYKIVTDAMGALRLKVGRDLELTRLGTWAPLWVVDFPMFEDDSEGGLTAMHHPFTAPKDMSPEQLAAAPTTAIANAYDMVINGYEVGGGSVRIHRTEMQQTVFGILGITEDEQREKFGFLLDALKFGTPPHAGLAFGLDRLVMLLTGTDNIRDVIAFPKTTAAACLMTDAPSFANPASLQELSISVVAKKGTTDAGAEENQ

SEQ ID NO: 78501 - protein, 317 aa, Yersinia pestis
MLILNKQKILDKFDADRITLLLKEGFIAFSQQRVQMPPVQHLLFDQANGDCCIKSGYLQGDDQFVVKVSGGFYDNPAQGLASNQGVMMAFSAKTGEPQAILLDEGWLTALRTALAGRIVAELCAPQHISALGIVGTGIQARLHLMYLKNVMTCRQLWVWGRSETALEEYRQYAQAEGFAVNTTLNAAELAHHSQFIVTTTPSREPILQAEDIQPGTHITAVGADSAGKHELSAELVARADKILVDSIAQCTDFGEVSLAFKQGLLAHHNLTEIGLALAQGIPFRENDQQITLADLTGLGIQDVQIVKGILGDKKGVL

SEQ ID NO: 78502 - protein, 246 aa, Yersinia pestis
MWIGVISLFPEMFRAITDYGVTGRAVKNGLLSVQCWSPRDFTYDRHRTVDDRPYGGGPGMLMMVQPLREAIHAAKAAAGEGAKVIYLSPQGRKLDQQGVCELAMNQKMILVCGRYEGVDERVIKTEIDEEWSIGDYVLSGGELPAMTLIDSVSRFIPGVLGHHASAEEDSFVDGLLDCPHYTRPEVLEGMEVPPVLLSGNHAEIRRWRLKQSLGRTWLRRPELLESLALTDEQMVLLAEFQREHKP

SEQ ID NO: 78503 - protein, 269 aa, Yersinia pestis
MAIELIAIDMDGTLLNPQHEITPRVKQAIAAARAKGVCVVLATGRPYIGVQRYLRELNMENSGDYCISNNGALVQKAATGECILQETLSFEDYLYFEALSRELGVSFQAFDFNTLYTANKDISKYTLHEVMLTGIPLKYRAVEEMDPTLRFPKVMMIDEPERLDRALAMMPAEVFERFTIMKSAPFYLEILSKRADKGTGVKMLAEHLGIAQKNVMALGDQGNDIAMVNYAGVGVAMGNAIPELKEIAQYVTGTNCEDGVATAIEKYIG

SEQ ID NO: 78504 - protein, 182 aa, Yersinia pestis
MSKQLNPAVPDQPIVLGKMGSTYGIRGWLRVFSSTENAESIFDYQPWFIQQAGKWQHVELEDWKRHSQDLIIKVKGVDDREAANLLTNCEIIVDSTQLPALEEDDYYWKDLMGCQVVTTTGYELGKIIDMMETGSNDVMVVKANLKDAFGMKERLVPFLHGQVIKKVDLTAQRVEVDWDPGF

SEQ ID NO: 78505 - protein, 548 aa, Yersinia pestis
MAAKDVKFGNDARIKMLRGVNILADAVKVTLGPKGRNVVLDKSFGSPTITKDGVSVAREIELEDKFENMGAQMVKEVASKANDAAGDGTTTATVLAQSIITEGLKAVAAGMNPMDLKRGIDKAVIAAVEELKKLSVPCSDSKAIAQVGTISANSDSTVGELIAQAMEKVGKEGVITVEEGSGLQDELDVVEGMQFDRGYLSPYFINKPETGSIELESPFILLADKKISNIREMLPVLEAVAKAGKPLLIIAEDVEGEALATLVVNTMRGIVKVAAVKAPGFGDRRKAMLQDIATLTAGTVISEEIGLELEKTTLEDLGQAKRVVINKDTTIIIDGVGDEAAIQGRVAQIRQQIEDATSDYDKEKLQERVAKLAGGVAVIKVGAATEVEMKEKKARVEDALHATRAAVEEGVVAGGGVALIRAAHAIAGLKGDNEDQNVGIKVALRAMESPLRQIVVNAGEEASVIANKVKAGEGSFGYNAYTEEYGDMIAMGILDPTKVTRSALQYAASIAGLMITTECMVTDLPRDDKGADMGAGGMGGMGGMGGMM

SEQ ID NO: 78506 - protein, 325 aa, Yersinia pestis
MSDTASWQPSAPIANLLKRAAIMAEIRRFFADRGVLEVETPTMSQATVTDIHLVPFETRFVGPGAADGLTLYMMTSPEYHMKRLLAAGSGPIYQLGRSFRNEEAGRYHNPEFTMLEWYRPHYDMYRLMNEVDDLLQQILDCNSAETLSYQQAFLRHLNIDPLSAEKAQLREVAAKLDLSNIADTEEDRDTLLQLLFTVGVEPYIGRDKPAFIYHFPASQASLAEISTEDHRVAERFEVYFKGIELANGFRELTDGDEQLQRFEQDNRNRAKRGLPQNPIDMNLIAALKQGLPDCSGVALGVDRLVMLALNAERLSDVIAFPVNIA

SEQ ID NO: 78507 - protein, 82 aa, Yersinia pestis
MVTIRLARGGAKKRPFYQVVVTDSRNARDGRFIERVGFFNPIASGQAEALRLDLDRIEHWIGLGATVSDRVSVLIKDAKKAA

SEQ ID NO: 78508 - protein, 804 aa, Yersinia pestis
MSNTYDSSSIKVLKGLDAVRKRPGMYIGDTDDGTGLHHMVFEVVDNAIDEALAGHCKEILVTIHADNSVSVQDDGRGIPTGMHDEEGVSAAEVIMTVLHAGGKFDDNSYKVSGGLHGVGVSVVNALSEKLELVIRREGKVHEQTYKMGVPQAPLKVVGETEQTGTTVRFWPSFQTFTNNTEFQYEILAKRLRELSFLNSGVSIKLKDKRNDKEDHFHYEGGIKAFVEYLNKNKNPIHPKVFYFSTMKDDIGVEVALQWNDGFQENIYCFTNNIPQRDGGTHLVGFRTAMTRTLNSYMDKEGYSKKAKISATGDDAREGLIAVVSVKVPDPKFSSQTKDKLVSSEVKTAVETLMNEKLVEYLLENPTDAKIVVGKIIDAARAREAARKAREMTRRKGALDLAGLPGKLADCQERDPALSELYLVEGDSAGGSAKQGRNRKNQAILPLKGKILNVEKARFDKMLSSQEVATLITALGCGIGRDEYNPDKLRYHNIIIMTDADVDGSHIRTLLLTFFYRQMPEIIERGHVFIAQPPLYKVKKGKQEQYIKDDDAMEQYQMTLALDGAALHTNAHAPALAGEPLEKLVAEHYSVQKTIARMERRYPRALLNNLIYQPTLQEEDLGNKEVVTQWIDSLVVLLNEKEHHGSSYSSVVRENRERQLFEPILRIRTHGVDTDYDLDFDFIHGGEYRKICLLGDKLRGLIEDGAFVERGERRVPVSSFEEALDWLVKESRRGLAIQRYKGLGEMNPDQLWETTMDPESRRMLRVMVKDAIAADQLFTTLMGDAVEPRRAFIEENALRAANIDI

SEQ ID NO: 78509 - protein, 453 aa, Yersinia pestis
MFENLTDRLSRTLRNISGRGRLTEENIKETLREVRMALLEADVALPVVRDFINRVKERAVGHEVNKSLTPGQEFVKIVKNELISAMGEVNNELNLAAQPPAVVLMAGLQGAGKTTSVAKLGKFLKEKQKKKVLVVSADVYRPAAIKQLETLAQGVGIDFFPSDAQEKPIDIVNRALQQAKLKFYDVLIVDTAGRLHVDEAMMDEIKQVHAAIKPVETLFVVDAMTGQDAANTAKAFNEALPLTGVVLTKVDGDARGGAALSIRHITGKPIKFLGVGEKSDALEPFHPDRIASRILGMGDVLSLIEDIESKVDRAQAEKLATKLKKGDGFDLNDFLDQLKQMRNMGGMASMLSKMPGAGQLPENVKSQMDDKVTVRMEAIINSMTLKERAKPEIIKGSRKRRIATGSGVQVQDVNRLLKQFDEMQRMMKKMKNGGLAKMMRGMKGMMPPGFPGR

SEQ ID NO: 78510 - protein, 297 aa, Yersinia pestis
MQTISALTSENGWRGTLSTLYWLSNSLSRCSYNAMPVFSILALLAYSLSLGLIIPSLVRKNSAYRRLALVSAVVALVCHAIALKNQIFDVGVGQNLTLLNIGSIVGLMICTIMTIVASQGRGWFLLPIVYSFAMINLALASLLPGEFITHLEASPEIFIHIGLALFAYATLIIAALYALQLAWLDYQLKHKKLTFNADMPPLMSIERKMFHITQIGVVLLTLTLCTGLLYMDNLFSKENVHKAVLSIMAWFVYIVLLWGHYHEGWRGRRVIWFSFAGAFLLTLAYFGSRLVQEIMVR

SEQ ID NO: 78511 - protein, 366 aa, Yersinia pestis
MKFIIEREHLLKPLQQVSSPLGGRPTLPILGNLLLQVTEGSLRLTGTDLEMEMVACVALSQSHEPGATTVPARKFFDIWRGLPEGAEITVALDGDRLLVRSGRSRFSLSTLPAIDFPNLDDWQSEVEFTLPQATLKRLIESTQFSMAHQDVRYYLNGMLFETEGEELRTVATDGHRLAVCSMPIGQTLPSHSVIVPRKGVMELVRLLDGGDTPLRLQIGSNNIRAHVGDFIFTSKLVDGRFPDYRRVLPKNPDKMLEAGCDLLKQAFSRAAILSNEKFRGVRLYVSHNQLKITANNPEQEEAEEILDVSYEGTEMEIGFNVSYVLDVLNALKCEDVRLLLTDSVSSVQIEDSASQAAAYVVMPMRL

SEQ ID NO: 78512 - protein, 462 aa, Yersinia pestis
MSLSLWQQCLARLQDELPATEFSMWIRPLQAELSDNTLALYAPNRFVLDWVRDKYLNNINGLLNDFCGTEVPLLRFEVGSKPAARAHNNPVTASVSAPVAPVTRSAPMRPSWDNSPAQPELSYRSNVNPKHTFDNFVEGKSNQLARAAARQVADNPGGAYNPLFLYGGTGLGKTHLLHAVGNGIMARKANAKVVYMHSERFVQDMVKALQNNAIEEFKRYYRSVDALLIDDIQFFANKERSQEEFFHTFNALLEGNQQIILTSDRYPKEINGVEDRLKSRFGWGLTVAIEPPELETRVAILMKKADENDIRLPGEVAFFIAKRLRSNVRELEGALNRVIANANFTGRAITIDFVREALRDLLALQEKLVTIDNIQKTVAEYYKIKVADLLSKRRSRSVARPRQMAMALAKELTNHSLPEIGDAFGGRDHTTVLHACRKIEQLREESHDIKEDFSNLIRTLSS

SEQ ID NO: 78513 - protein, 46 aa, Yersinia pestis
MKRTFQPSVLKRNRSHGFRARMATKNGRQVLARRRAKSRSRLTVSK

SEQ ID NO: 78514 - protein, 119 aa, Yersinia pestis
MVKLAFPRELRLLTPSHFTFVFQQPQRAGTPQITILGRLNELGHPRIGLTVAKKHVKRAHERNRIKRLTRESFRLHQHALPSMDFVVLVKKGVADLDNRALTEALEKLWRRHCRQAPAS

SEQ ID NO: 78515 - protein, 417 aa, Yersinia pestis
MLGSLTVMTLAVAVWRPFIYHPEHEPVAKSVVLDTSQSRILLPEASEPLDQPTPDDAIPQDELDTKDANDTGVHEYVVSTGDTLSSILTQYGIDISDVSLLANQNRDLRNLKIGQQISWTVNDTGDLQSLTWEVSRRETRTYNRVGNNFKETKELQKGEWKNSVLTGRLDGSFVGSAKKAGLTAAEIRAVTKALQWQLDFSKLRKGDQFAVLMSREMLDGRSEQSQLVGVRMRSGGKDYYAIRAEDGKFYDRQGSGLARGFLRFPTLKQFRVSSNFNPRRLNPVTGRIAPHKGVDFAMPVGTPVLAVGDGEVLISKFSGAAGNYVVIRHGRQYTTHYMHLKKLLVKPGQKVKRGDRIALSGNTGRSTGPHLHYEFWMNQQAVNPLTAKLPRSEGLSGKDRSEYLAIVKQVIPQLQLD

SEQ ID NO: 78516 - protein, 546 aa, Yersinia pestis
MDSQRNLLLIALLFVSFMIWQAWQVDNNPQPTAQTTQQTTNTATGDKASQAVPGSGQGQLITVKTDVLSLTINTRGGDIEQANLLAYPDTLGSSNTFELLETTPSFVYQAQSGLTGKNGPDNPANGDRPLFEVPQTSFVLADGQDELRIPLTFTSKDGSVFIKTFVLKRNDYAIGVDYHVNNASAAPLELTLFGQLKQSINLPKKRDTGSNNFALQTYRGAAYSSDETKYKKYSFSDIEDKNLDITTKGGWVAMLQQYFATAWIPAANETNTFYSAELGNGLAAIGFKGAPVVIQPGEQKQLSATLWVGPEIQNKMAEIAPHLDLTVDYGWLWFISQPLFKLLKFIHSFVGNWGFSIIVITFIVRGIMYPLTKAQYTSMAKMRLLQPKLAAMRERIGDDKQRMSQEMMALYKAEKVNPLGGCLPLIIQMPIFLALYYMLMSSVELRHAPFILWIHDLSAQDPYYILPILMGITMYFIQKMSPTTVTDPMQQKIMTFMPVIFTVFFLWFPAGLVLYYIVSNLVTILQQQLIYRGLEKRGLHSREKKK

SEQ ID NO: 78517 - protein, 480 aa, Yersinia pestis
MSRRLRRTKIVTTLGPATDRDNNLEKIIAAGANVVRLNFSHGSAEDHELRANKVREIAARLGRHVAILGDLQGPKIRVSTFKEGKVFLNINDKFLLDANMAKGEGDKNKVGIDYKGLPADVVPGDILLLDDGRVQLKVVEVQGMKVFTEVTVGGPLSNNKGINKLGGGLSAEALTEKDKADIVTAAKIGVDFLAVSFPRTGEDLHYARRLARDAGCNAQIVAKVERAEAVATDEAMDDIILASDVVMVARGDLGVEIGDPELVGIQKKLIRRARQLNRAVITATQMMESMITNPMPTRAEVMDVANAVLDGTDAVMLSAETAAGQYPAETVAAMARVCLGAEKIPSINVSKHRLDVQFDNVEEAIAMSTMYAANHLKGITAIIAMTESGRTALMMSRISSGLPIFAMSRHDHTLNLTAIYRGVTPVYCDPHTDGVLAATEAVKRLQDKGFLVSGDLVIVTQGDVMGTIGTTNTSRIIRVE

SEQ ID NO: 78518 - protein, 454 aa, Yersinia pestis
MSTTDTIVAQATPPGRGGVGILRVSGRAASEVAHAVLGKLPKPRYADYLPFKDVDGSTLDQGIALYFPGPNSFTGEDVLELQGHGGPVILDLLLKRILALPGLRIARPGEFSERAFLNDKLDLAQAEAIADLIDASSEQAARSAVNSLQGAFSARIHQLVEALTHLRIYVEAAIDFPDEEIDFLSDGKIEGQLNGVMADLEQVRTEARQGSLLREGMKVVIAGRPNAGKSSLLNALAGREAAIVTDIAGTTRDVLREHIHIDGMPLHIIDTAGLREANDEVERIGIERAWNEIEQADRVLFMVDGTTTDATEPAAIWPEFMARLPATLPITVVRNKADITGETLGLTKVNGHSLIRLSARTGEGIDLLRDHLKQSMGFTSNTEGGFLARRPHLQALETAARHLIQGHEQLVSAYAGELLAEELRLAQQSLSEITGEFSSDDLLGRIFSSFCIGK

SEQ ID NO: 78519 - protein, 494 aa, Yersinia pestis
MAVMNTVQVAQACDLVIFGAKGDLARRKLLPSLYQLEKAGHIHPDTRIIGVGRAEWDKDAYTAVVKEALDTFMKEPLDDELWQKLSSRLDFCNLDVNDSKHFTKLGKMLDQKHRTTINYFAMPPSTFGAICKGLGEAGLNKEPSRVVMEKPLGTDLAPSRVINDQVAEYFNECQVYRIDHYLGKETVLNLLALRFANSLFASNWDNRTIDHVQITVAEEVGIEGRWGYFDQAGQMRDMIQNHLLQILTMIAMSPPADLSTDRIRDEKVKVLRSLRRIDHTNVRETTVRGQYTAGFVQGNKVPGYLEEEGANKNSNTETFVSIRVDIDDWRWAGVPFYLRTGKRLPSKCSEVVVYFKNPALNLFRESYQQLPQNKLTIRLQPDEGIEIEVLNKVPGLEHKHRLQTTKLDLSFSKTFNEQHIADAYERLLLETMRGIQALFVRRDEVEEAWKWVDSIMNAWAADNEAPKPYQSGTWGPVASVAMITRDGRSWNEFE

SEQ ID NO: 78520 - protein, 635 aa, Yersinia pestis
MPIQILPPQLANQIAAGEVVERPASVVKELVENSLDAGATRIDIDIERGGAKLIRIRDNGCGISKDDLALALARHATSKISSLEDLEAILSMGFRGEALASISSVSRLILTSRTAEQSEAWQAYAEGRDMAVTIKPAAHPVGSTLEVLDLFYNTPARRKFMRTEKTEFGHIDEVVRRIALARFDVAINLNHNGKLIRQYRAAPDPAQHERRLASICGPAFLQHALAIAWQHGDLNIHGWVADPAASHTLSEMQYCYVNNRMMRDRLINHAIRQAYQDRLNDAQQPAYVLYLDIDPHQVDVNVHPAKHEVRFHQARLVHDFIYQAVTAVLQQTNAPILNISEEGEVDAPRWQQENRVAAGTNKYAQPEAAKSSAAEQAVARERSSARERAAPAYKEDHPYQKQQGELYRQLLQPSAAAKPATSPAAIPASSVSSPSIPVQRITQAEEPLHGDNYSFGRVLTVFPPCYALIEYQGGVALLSLAVAERWLKQAQLSPPEEGLRPQPLLIPLKITLDKNEIAACQNHEKLLITMGIELSVEQGRATLRAVSLPLRQQNLQKLIPELLGYLSQHEEISPDTLATWLARHLGSEHEVWNVSQAIQLLTEVERLCPQLVQSPPAGLLQPIDIKAALATLTHE

SEQ ID NO: 78521 - protein, 61 aa, Yersinia pestis
MLILTRRVGETLMIGDEVTVTVLGVKGNQVRIGVNAPKEVSVHREEIYQRIQAEKSQPTTY

SEQ ID NO: 78522 - protein, 875 aa, Yersinia pestis
MSKSTAEIRQAFLDFFHSKGHQVVSSSTLVPNNDPTLLFTNAGMNQFKDVFLGLDKRAYSRATTSQRCVRAGGKHNDLENVGYTARHHTFFEMLGNFSFGDYFKHDAINFAWELLTSEQWFNLPKEKLWVTVYETDDEAYNIWANEVGVPHERIIRIGDNKGGAFASDNFWQMGDTGPCGPCSEIFFDHGDHIWGGPPGSAEEDGDRYIEIWNIVFMQFNRQSDGTMLPLPKPSVDTGMGLERIAAVLQHVNSNYEIDLFRDLIAAVADVTGATDLSSKSLRVIADHIRSCAFLISDGVIPSNENRGYVLRRIIRRAIRHGNMLGAKETFFYKLVAPLIAVMGPAAAELKQQQAMVEQVLKTEEEQFARTLERGLALLDDELSKLTGDTLDGETAFRLYDTYGFPVDLTADVCRERNLKVDEAGFEQAMEAQRRRARESSGFGADYNSLIRVDSASQFSGYDHVQQHATVTALFRNGEAVDEIHAGEEAVVVLNRTPFYGESGGQVGDKGELKNATATFSVTDTQKYGQAIGHVGILTTGTLRVNHSVEALVDVVRRNRIRLNHSATHLLHAALRNVLGEHVAQKGSLVNDKYLRFDFSHFEAMKPEQIRLVEDLVNEQIRRNMPVQTEVMELDAAKEKGAMALFGEKYDDQVRVLTMGDFSTELCGGTHASRTGDIGLFRILTESGTAAGIRRIEAVTGEGAIALLHQQSDLLQDVAHLVKGDIHNLADKVRAVLDRSKMLERELQQLKDQQAAQESASLSSSAKLINGVKLLVSQLDNVEPKMLRTMVDDLKNQLGSAIIVLATTADDKVSLIVGVTKDLTGKVKAGELIADIAQQVGGKGGGRPDMAQAGGTDVQALPAALASVEAWVASRM

SEQ ID NO: 78523 - protein, 187 aa, Yersinia pestis
MNDQLSRAMRLLSQRDHSESELRRKLAAPPFSAKGNWGKRSGAKSSDVVESNLVESNPVESNLAESNAIEESDPQVIEQVIDYCYQHNWLDDSRFAASYINSRSRKGYGVQRIRSELMQKGVDKERILAAFENSEIDWCQLAKEVAQRKFSETLPVEWKEKAKVQRYLLYRGFFQEEIQSIYTDSVE

SEQ ID NO: 78524 - protein, 356 aa, Yersinia pestis
MAIDENKQKALAAALGQIEKQFGKGSIMRLGEDRSMDVETISTGSLSLDIALGAGGLPMGRIVEIYGPESSGKTTLTLQVIAAAQREGKTCAFIDAEHALDPIYAKKLGVDIDNLLCSQPDTGEQALEICDALTRSGAVDVIIVDSVAALTPKAEIEGEIGDSHMGLAARMMSQAMRKLAGNLKNANTLLIFINQIRMKIGVMFGNPETTTGGNALKFYASVRLDIRRIGAVKDGDVVVGSETRVKVVKNKIAAPFKQAEFQILYGEGININGELVDLGVKHKLIEKAGAWYSYNGDKIGQGKANASNYLKENPAIAAELDKKLREMLLNGGNGEQPVAAATAEFADGADETNEEF

SEQ ID NO: 78525 - protein, 245 aa, Yersinia pestis
MNLHHLTDWLLAPQYLGWLWDGFLLTLWISACTVVAATLLGFLLAAARDSELKALKGFAIGYSALFRNTPLLIQLFFWYFAASQFLPASWIPWLNTPHEITLAGLTLAWPSFEFLAGFVGLTLYSTAFIAEELRAGISGVAKGQKYAAHALGLTGWQSMRYVVLPQALKIAMPPLLGQYMNIIKNSSLAMAIGVAELSYASRQVETETLRTFQAFGVATLLYIFIIALIEAWGMWRQQRTVVRGH

SEQ ID NO: 78526 - protein, 495 aa, Yersinia pestis
MSTPIILAIDEGTTNAKAIAVDRAGRVLAKASVPLQLEHPQPGWAEQDPLAIWLAVSQAVEGCLNQLAGAQVAGIAISNQRESVLIWERETGTPLTPVVSWQCRRSEAFCLALRQLPAAAMVAERTGLQIDPLFPAAKIHGMLAQIPHGAERAAHGELCVGTLDCWLTWQFSEGQSFSTDFSNAARTQLFNIHSGQWDPDLLALFGIPSLCLPAVLPSASIHGHTARTGILGLEQGVPIVAHIGDSHAALYGQGGDQAGEIKATYGTGSSLMMTLKQASAPSHGLSTTIAWHDGELRYALEGNITHTGSGVAWVSRMLGISDLSRLTDMAESQSGNQGVYFVPALSGLGAPYWDSQARGLFCGLTDATTPAVLARAALESVAYQIADVFFAMENAAHHRLERLRVDGGATSNRWLMQFQADLLQRTLIRNHTAEVSALGAAYLGGKTLGWWQDSQQLAALPREVEYIEPRIHSAEMQDNYSLWQTAIARARFQPK

SEQ ID NO: 78527 - protein, 314 aa, Yersinia pestis
MSNAEHLASVMVEQFIKAVDNGVDLVPVVADSTSTAKIGPFITRFPDRVVNVGIAEQAMVGMAVGLSMGGKIAVTCNAAPFLISRANEQLKIDVCYNNSNVKLFGLNSGASYGPLASTHHCIDDIAILRGFGNIEIYAPADPQECRQIIDYALAHQGPVYIRLDGKALPPLHDEHYRFAPGQIDVLQEGRDIALVAMGSTVHEAVSAAAILADNNISAAVVNVSSIRPCDTQQLFAILQQSQRVITIEEHNINGGVGSLVAEVLAEAGSGTPLVRLGIPDGGYAIAADRAEMRAYHGFDAAGIVARALRFCRGE

SEQ ID NO: 78528 - protein, 258 aa, Yersinia pestis
MSMATDVTNSKIQVRDLNFYYGKFHALKNISLDIAKNQVTAFIGPSGCGKSTLLRTFNKMYQLYPEQRAEGDILLDGQNILTDKQDIALLRAKVGMVFQKPTPFPMSIYDNIAFGVKLFESLSRADMDERVQWALTKAALWNETKDKLHQSGYSLSGGQQQRLCIARGIAIRPDVLLLDEPCSALDPISTGRIEELISELKSDYTVVIVTHNMQQAARCSDHTAFMYLGELIEFSDTDTLFTTPQQKQTEDYITGRYG

SEQ ID NO: 78529 - protein, 419 aa, Yersinia pestis
MAWNQPGNNGQDRDPWGSSNNNGGNSGGNNNKGGRDQGPPDLDDIFRKLSKKLSSLGGKGSGSGGNGASHGPGFSGRVVGIAVVAVVVIWAASGFYTIKEAERGVVTRLGKLSHIVQPGLNWKPTFIDEVVPVNVEAVRELAASGVMLTSDENVVRVEMNVQYRVTDPAAYLFSVTNPDDSLRQATDSAVRGVIGKYTMDKILTEGRTIVRSDTQRVLEETIRPYQMGITLLDVNFQAARPPEEVKAAFDDAIAARENEQQYIREAEAYTNEVQPRANGQAQRLLEDARAYAARKVLEAQGEVAGFAKLLPEYKAAPEITRERLYIETMEKVLGKTNKVLANDKGNNLMVLPLDQMLRGQGAANKVDGNKDTSLIRLNPAPSSQQTGASNSNTSSGSGSIMDQRRVNAQRDTSTRVGRE

SEQ ID NO: 78530 - protein, 432 aa, Yersinia pestis
MGKNVVVLGTQWGDEGKGKVVDLLTERAKYVVRYQGGHNAGHTLVINGEKTVLHLIPSGILRENVISIIGNGVVLAPDALMKEMTELEARGVPVRERLLLSEACPLILPYHVALDNAREKARGAKAIGTTGRGIGPAYEDKVARRGLRVSDLFNKETFAIKLKEIVEYHNFQLVHYYKEAAVDYQKVLDDVLAIADILTAMVVDVSELLDNARKQGELIMFEGAQGTLLDIDHGTYPYVTSSNTTAGGVATGSGLGPRYVDYVLGIVKAYSTRVGAGPFPTELNDETGEFLRKQGNEYGATTGRSRRTGWLDIVAVRRAVQINSLSGFCMTKLDVLDGLKEVKLCVGYRMPDGREVDTTPLAAEGWEGIEPIYETMPGWSETTFGVKEHSKLPQAALNYIQRVEELTGVPIDIISTGPDRDETMILRDPFDA

SEQ ID NO: 78531 - protein, 318 aa, Yersinia pestis
MAAYKPTIKAPSKYGDIIFSALVKLAALITLFLLGGIIISLIVASWPSIEKFGFAFLWTKEWDPPAEQFGALVPIYGTIVTSVIALIIAVPVSFGIALFLTELAPNWLKRPLGVAIELLAAIPSIVYGMWGLFVFAPLFARYFQEPVGNVMSGIPIVGTLFSGPAFGIGILAAGIILAIMIIPYIAAVMRDVFEQTPVMMKESAYGIGCTTWEVIWRIVLPYTKNGVIGGVMLGLGRALGETMAVTFIIGNTYQLDSFSLFMPGNSITSALANEFAEAESGLHTAALMELGLILFVITFIVLALSKLMIMRLAKNEGR

SEQ ID NO: 78532 - protein, 324 aa, Yersinia pestis
MVNIYSMRRKIMKNTLLKSCLTAALISMAGVAGAASNGLIAIITPSHDNPFFKAEAEGAKAKATELGYTTLVASHDDDVNKQNQLIETAIARKAKAIILDNAGSDATIGPLKKAKAAGIPAFLIDREINETGIAVSQIVSNNYQGAQLGAEKFVTLMGGKGKYIELLGRESDTNAHVRSQGYHDVIDEHSDMKMVAQQTANWSQTEAFNRMESILQANPDITGVISGNDTMALGAEAALKAAGRNDVVVVGFDGSDYVRDSIINNGNIKATVLQPGWAQAQMAVVQADQYLKTGKTGLEEKQLMDCVLIDENNAKNLNVFALKD

SEQ ID NO: 78533 - protein, 609 aa, Yersinia pestis
MCGIVGAVAQRDIAEILIEGLRRLEYRGYDSAGLAVVDSEGHLTRLRRVGKVHALSDAAEKQDLHGGTGIAHTRWATHGEPSEANAHPHVSDYISVVHNGIIENHEPLRELLISRGYRFSSETDTEVIAHLVHWEQQQGGSLLEVVKRVIPQLRGAYGTVVMDSRDPSRLIAARSGSPLVIGCGVGENFIASDQLALLPVTRRFIFLEEGDVVEVTRRSISIFDKQGNAIERPEIESQVQYDAGDKGIYRHYMQKEIYEQPMAIKNTLEGRLSHGMIDLSELGPKADALLAEVQHIQIIACGTSYNSGMVSRYWFESLAGVPCDVEIASEFRYRKSAVRPNSLLITLSQSGETADTLAALRLSKELGYLGSLAICNVAGSSLVRESDLALMTKAGTEIGVASTKAFTTQLTVLLMLVGRIGKLKGADASLEHDIVHALQALPARIEQMLSLDKTIEALAEGFSDKHHALFLGRGDQYPIAMEGALKLKEISYIHAEAYAAGELKHGPLALIDADMPVIVVAPNNELLEKLKSNIEEVRARGGLLYVFADQDAGFTDSEGMKIIQLPHVEEIIAPIFYTVPLQLLSYHVALIKGTDVDQPRNLAKSVTVE

SEQ ID NO: 78534 - protein, 737 aa, Yersinia pestis
MLKKILPVLITLAIVHNTPTAWAAEAPKTDSFYLPKSLDLSPLRLHNIESNPYGKDFNYAQQFKTLDLEAVKKDIKTVLTTSQDWWPADYGNYGPFFIRMAWHGAGTYRIYDGRGGADGGQQRFEPLNSWPDNANLDKARRLLWPIKKKYGAKISWGDLMVLTGNVALESMGFKTLGFAGGREDDWQSDLVYWGAGNKMLSDNRDKNGKLPKPLAATQMGLIYVNPEGPNGKPDPVAAAKDIREAFARMAMNDEETVALIAGGHTFGKAHGAASPEKCLGAAPGEAGLEQQGLGWANKCGSGNGKDTITSGLEGAWTTDPTHFTMQYLSNLYKHEWVLTKSPAGAWQWKPKNAANVVPDATDPTKFHPLMMFTTDIALKVDPEYKKITTRFLENPEEFKMAFARAWFKLTHRDMGPAARYLGDEVPKETFIWQDPLPAANYKMIDSADISELKDKILKTGLSDTKLIKTAWASASTFRGTDFRGGDNGARIRLAPQKDWPVNDPAELHSVLAALMEVQNNFNKDRSDGKKVSLSDLIVLGGNAAIEDAAKKAGYSISIPFTPGRTDASQEETDVSSFAVLEPTADGFRNYYDAKRNTLSPIASLIDRANKLELTVPEMTVLIGGLRVLDVNSGGSKAGVLTNTPGQLNNNFFVNLLDMSTKWTKSPKAEGYFDGYDRKTGKLKWTASSVDLVFGSNPELRAVAEVYASDDAKEKFVHDFTKVWEKVMNLDRFDIKNN

SEQ ID NO: 78535 - protein, 90 aa, Yersinia pestis
MLCAIYRSPKRDQTYLYIEKKDDFSRVPAELLASFGKPQFAMLLALNERKTLATADVEKVKNALIEQGFYLQVPPPPESLLKMHLGETKA

SEQ ID NO: 78536 - protein, 456 aa, Yersinia pestis
MSNSSMSVVILAAGKGTRMYSDLPKVLHPLAGKPMVQHVIDAAMKLGAQHVHLVYGHGGELLKKTLADPSLNWVLQAEQLGTGHAMQQAAPHFADDEDILMLYGDVPLISVDTLQRLLAAKPEGGIGLLTVKLDNPSGYGRIVRENGDVVGIVEHKDASDAQREINEINTGILVANGRDLKRWLSLLDNNNAQGEFYITDIIALAHADGKKIATVHPTRLSEVEGVNNRLQLSALERVFQTEQAEKLLLAGVMLLDPSRFDLRGELTHGRDITIDTNVIIEGHVILGDRVRIGTGCVLKNCVIGDDSEISPYTVLEDARLDANCTVGPFARLRPGAELAEGAHVGNFVEIKKARLGKGSKAGHLSYLGDAEIGAGVNIGAGTITCNYDGANKFKTIIGDDVFVGSDTQLVAPVTVANGATIGAGTTVTRDVAENELVISRVKQVHIQGWKRPVKKK

SEQ ID NO: 78537 - protein, 218 aa, Yersinia pestis
MYQHRDWQGALLDFPVNKVVCVGSNYAEHIKEMGSTASVEPVLFIKPETALCDIRQPVSIPKDFGSVHHEIELAVLIGTPLKQASEDRVARAIAGYGVALDLTLRELQAGFKKAGQPWEKAKAFDGSCPISGFIPVAEFGDAQQADLSLTINGEIRQQGNTRDMITPIIPLISYMSRFFTLRAGDIVLTGTPQGVGPMQSGDMLKIMLNGKTVNTRII

SEQ ID NO: 78538 - protein, 513 aa, Yersinia pestis
MQLNSTEISELIKQRIAQFNVVSEAHNEGTIVSVSDGIIRVHGLADVMQGEMIALPGNRYAIALNLERDSVGAVVMGPYADLAEGMKVKCTGRILEVPVGRGLLGRVVNTLGEPIDGKGSIENDGFSAVEAIAPGVIERQSVDEPVQTGYKSVDAMIPIGRGQRELIIGDRQTGKTALAIDAIINQRDSGIKCVYVAIGQKASTVANVVRKLEEHDALANTIVVVATASESAALQYLAPYSGCAMGEYFRDRGEDALIIYDDLSKQAVAYRQISLLLRRPPGREAYPGDVFYLHSRLLERAARVNAEYVEAFTKGEVKGKTGSLTALPIIETQAGDVSAFVPTNVISITDGQIFLESSLFNAGIRPAVNPGISVSRVGGAAQTKIMKKLSGGIRTALAQYRELAAFSQFASDLDDATRKQLSHGQKVTELLKQKQYAPMSVAQQSLVLFAAERGYLGDVELAKVGSFEAALLAFADREHAELLQQINQTGAYNDEIEAKLKGILDTFKATQSW

SEQ ID NO: 78539 - protein, 177 aa, Yersinia pestis
MSEFVTVARPYAKAAFDFAVEHQAVERWQNMLAFTAQVTRNEQIAELLSGAVAPETMSTTFIAVCGDQLDEPAQNFIRVMAENGRLLVLPEVLQQFIQLRASLESTVDVEVSSARALNDEQLAKIAAAMEKRLSRKVKLNCKIDKSVMAGVVIRAGDMVIDGSVRGRLERLADVLQS

SEQ ID NO: 78540 - protein, 156 aa, Yersinia pestis
MNLNATILGQAIAFVLFVIFCMKYVWPPIMAAIEKRQQEIADGLSSAERAKKDLDLAQANATDQLKKAKAEAQVIIEQASKRKAQILDEAKAEAEQERNKIVAQAQAEIDAERKRAREELRKQVAMLAIAGAEKIIERSVDEAANSDIVDKLVAEL

SEQ ID NO: 78541 - protein, 79 aa, Yersinia pestis; identical to SEQ ID NO: 42723

SEQ ID NO: 78542 - protein, 550 aa, Yersinia pestis
MRESAHVGVALPRGCDQIIAVLAIQWLGAAYVPISVEWPACRRSQVITLADIHFLIGDRTLGWPEEVDVLSVESEPVSDERPTPRVVSADSLAYLIFTSGSTGVPKGVAVSHGAAVNTIESVNRQHQINPQDTALALSALYFDLSVWDVFGVLSAGARLVLIPQQAQREAAIWLSLVQQHQVTVWNSVPALLEMMLLFNEQIFNEQDEQPPALPSLRVVMLSGDWIVPELPQRLRRFAPNAHCVAMGGATEAAIWSNYWIADTALTGWCSVPYGVPLPNQQFRIVNEQEEDCPDWVAGELWIGGQGVAQGYYGDSAGTEQQFILRDGQRWYRTGDTGRYRPDAIIEFLGRKDQQVKISGYRVELEEITLALKSYPSIEDVVAFVIQHNDRSVLAAVAVTPTPLDRQAVTAFLRERLPEYAIPSRLGHCCAWPLTDNGKRDQHALRAFVTPSFEPTETPQVTQPMTAMEQLLCEQLQLLLNVVSIQSHDNFFALGGDSFIAIRLTSVLRRNYGVELPLWKIFSVQTIAQIALVMEPAHQSAGRIQFVEDSI

SEQ ID NO: 78543 - protein, 87 aa, Yersinia pestis
MANIKSAKKRAVQSEKRRKHNASRRSMVRTFIKKVYAAIAAGDKDAAQKAFNEMQPIVDRQSCKGLIHKNKAARHKSNLVAQINAMQ

SEQ ID NO: 78544 - protein, 815 aa, Yersinia pestis
MKKTNKLLISIVSAISFSAYSNDINDAKVCFYELENFSGESFCAYEGESQSTINNDFDKKIKSISIPPGMVITLYDGIDFTGKKKKLKNDVNLDGMKSFGLYNKISSYHIDPAVCFYTEDNFQGDSTCLAASQHIDLYSDAEGFANSNRTVLPIHNDSIQSIKVPLGMMTTIYKNDQFNAPFFELTENINLETLKTLAMDNQLTSLKASEKKGLYCDQKCIILEKHEINLPEVFGEYWHDSRLVNKQVILSFNSQENGINDDYKINLTNGPSVRILKNEIIFSDYNMITKFSFDRIDKFDKLSFILQIEKDIVQVQYIQTLDDQLIDLSPIISFKWTHMIDDTPTLTIKNKNTDKPLILNKSIITADTGDQNWEKRDIENTSQIICAFTPFLNLYNYIVQGTCRQLDGIIFKADQYFNSNTKGKTLHIAGKSFPLKPDLLTELNNDGLHENKMLLTYIDNVNNNQSLSLPAVAKTCMVSIHSILSTRQTRQIRPACIDWTLEIMTDFTLLFGSSLRTWNTEYFGRIIQSIITTGNTGVAVENTEIEKRLSHAVKKAIMSQSIDSTLDHIKTAFDYAQLNYFDYSLFYVSEDTPSQVEQLPLGIYELLLPSFIYRPIPPIIIENSERVEQHELAFEIEILPSLFPEDARPSDTEIEHARELRQKISETIAQWGQQYQGAHAIDDVDQEVNADENAALSQLLHAGHIVTGIIHRRLILNRPGEIYVVVKLRGEIIAIVLADRFNNRDEVELVASATLPDYVLSPDSEGTVRGAGTAAVYELARYLQQQGAKTLFSETISQPSARVKQKVGFTFKSEF

SEQ ID NO: 78545 - protein, 95 aa, Yersinia pestis
MLYTVSHSPYHCDLSALLRLATSEDDILLLQDGVIAALKESETLKLLLNNPASLFVLEDDVIARGLVGQISDNATLISYTHFVDLTLRHQQQLAW

SEQ ID NO: 78546 - protein, 557 aa, Yersinia pestis
MMNLKVNRSIISASISVILAAGVMGGPAYADDVKLKATNTNVAFADFTPKEYSTKNKPNIIVLTMDDLGYGQLPFDKTSFDPKSMEDRDVVDTYKIGIDKAIEAAKKSTPTLLSLMDEGVRLTNGYVAHGVSGPSRAAIMTGRSPARFGVYSNTDAQNGISLEETFLPELLQNNGYYTAAIGKWHLSKISNVPVPEAEQTRDYHDNFTTYSADEWQPQNRGFQYFMGYHAAGTAYYNSPSLFHNKERVKAKGYISDQLTDEAIGVANRAKSLDEPFMMYLAYSAPHLPNDNPAPDEYQKHFNTGSQTADNFYASVYSVDQGVKRLLEQLKKNGQYDNTIIMFTSDNGAVIDGPLPLNGNQKGYKSQTFPGGTHTPMFIWWKGKLQTGNYDKLISAMDFMPTALEAAEIDAPNNLDGVSLLPYLTGKSKAEPHKYLTWVTSYTHWFDEENIPFWDGYHKFVRNESNEYPKNPNTEDLSQFSYTIRSNDYSLTYTYEGNKLNLYKLSDLNQKQDLASTHPDVVKVMQAEMRNFINQSQSPVSEVNQDKFNKIKQSLGMN

SEQ ID NO: 78547 - protein, 123 aa, Yersinia pestis
MKIHLSSWRYFALLTLPPLVLAFNLLYSFASLVLLMLFLVTHYYCWRLWLDERLFTLLNKESSLAEFDEGMAQLWIAKSGATRTLTERWCGVRGLFYRAMFSLIALWLTSLSSVLYLTLTLVD

SEQ ID NO: 78548 - protein, 171 aa, Yersinia pestis
MKHPFSTRLAAVQHYLSGKATLRETARQFSVGKSPLTRWIRAFRRQGEAGLEHHLSRTYTPEFRLCVVRYMMANRCSAADASAHFNIPNETIIQNWMKRYREGGKEALNPSKTGPTMPKDKYEHDSKPFSEMTHAELEKELEYLRAENAYLKKRKALREEKALREQQKKPE

SEQ ID NO: 78549 - protein, 171 aa, Yersinia pestis; identical to SEQ ID NO: 78548

SEQ ID NO: 78550 - protein, 171 aa, Yersinia pestis; identical to SEQ ID NO: 78548

SEQ ID NO: 78551 - protein, 171 aa, Yersinia pestis; identical to SEQ ID NO: 78548

SEQ ID NO: 78552 - protein, 261 aa, Yersinia pestis; identical to SEQ ID NO: 78459

SEQ ID NO: 78553 - protein, 171 aa, Yersinia pestis; identical to SEQ ID NO: 78548

SEQ ID NO: 78554 - protein, 152 aa, Yersinia pestis
MKKYLLLFGVLSFMPLIAQSDVSLDINMPGINLHLGDQDKRGYYWDGYDWQPPQWWKDHRGAHIGERNERGYSWDGGRWQKPQIQQGRNPFREQDRGNGMNNNPQPPRGEGPQKHSDNNNKGGNGQGQRTISNNAGPGTQQVYPQQDNHGHR

SEQ ID NO: 78555 - protein, 261 aa, Yersinia pestis; identical to SEQ ID NO: 78459

SEQ ID NO: 78556 - protein, 261 aa, Yersinia pestis; identical to SEQ ID NO: 78459

SEQ ID NO: 78557 - protein, 72 aa, Yersinia pestis; identical to SEQ ID NO: 55494

SEQ ID NO: 78558 - protein, 472 aa, Yersinia pestis
MSQNVYQFIDLQRVDPPKKPLKIRKIEFVEIYEPFSETQAKAQADRCLSCGNPYCEWKCPVHNYIPNWLKLANEGRIMEAADLAHQTNSLPEVCGRVCPQDRLCEGSCTLNDEFGAVTIGNIERYISDKAIAMGWKPDMSHVHPTGKRVAVIGAGPAGLACADVLARNGVQAVVFDRHPEIGGLLTFGIPAFKLEKEVMIKRRKIFSEMGIEFQLNTEVGKDITMEALLKDYDAVFLGVGTYQSMRGGLENEEANGVYDALPFLIANTKQLMGYEATAHEPYINMQGKRVVVLGGGDTAMDCVRSSIRQGATDVVCAYRRDEVNMPGSKREVKNAREEGVEFKFNLQPLSIEVNSNGKVCGVRMVRTQLGAPDAQGRRMAEQIPGSEHVLPADAVVMAFGFRPHSMEWLAAHDVKLDKQGRVIAPESTDNAFQTSNPKIFAGGDIVRGSDLVVTAIAEGRKAADGIMNYLEV

SEQ ID NO: 78559 - protein, 261 aa, Yersinia pestis; identical to SEQ ID NO: 78459

SEQ ID NO: 78560 - protein, 38 aa, Yersinia pestis
MKVRASVKKLCRNCKIVKRNGVVRVICSAEPKHKQRQG

SEQ ID NO: 78561 - protein, 279 aa, Yersinia pestis
MYKIKKFSQITGISEFNLRYFDQIGLLPAERDNSRYRLYHPRQIAMAHLILSLQKAHVSNEKIKSILMDYSSQNSQSALCYAQHAIDETLHQLTCARHFLTTQIERQMLINDAKRRLNNPFIEERNIEPLGIFSINTPNIIDFFKYVSEVSGNPDWYLRHRYGFIVERESIQKNNYKLMNFFCNEPNIINKHGGDFPAGSYFSGFYKGSLENNPAVSKHLSQADDNGMNHSSKVIIEHISGPATVKCKSEFLIKVMYPCHHQLDGSHETPTVLTPSSTN

SEQ ID NO: 78562 - protein, 51 aa, Yersinia pestis
MSVEQAPPELQLAVDLIYLLECNEIAPETALAALAIVQLDYQRKLRHKESD

SEQ ID NO: 78563 - protein, 261 aa, Yersinia pestis; identical to SEQ ID NO: 78459

SEQ ID NO: 78564 - protein, 121 aa, Yersinia pestis
MKKVLALMVAATLGLSSVAFAADTTATATPAATSTTATVAAQTKATQHQKHKVTKKTTEQKAQAAKKHEKKASVQKTPVQKAQAAKKHVKKASVQKAPVQKAQAAKKHHKTAKKPVAAPAA

SEQ ID NO: 78565 - protein, 156 aa, Yersinia pestis
MTDIEKAVTTFQAYRAAIGYPKIPPYEGEVIEYDFGRKIESNQPDFWTQYHEFLRLSDGLAADGVYFYGIACEGKLIGNRLIDNNDALRDGEMYDESMDGLIAIGSSNSDIFVYDTNTHKWESRDRIAIDDINESYDTLAELIDSQLQRINIGDAF

SEQ ID NO: 78566 - protein, 162 aa, Yersinia pestis
MTQLNNIVDELNSLALKLEYDVLPPAVFPSSLYEYDFGLKIGKAPQEFWDQYKALVELADGFDLDGFRMYGIEKHGDYENDLFTYNGYKARLDKEAPSLMSDESRYCIEIGSSSLDTYTYDVRYGKWESRDRVQYDNLFISCSNLIDFLAAILAEIREANVQ

SEQ ID NO: 78567 - protein, 131 aa, Yersinia pestis
MNNRLFKTLGAIIALLIFTPMIYLVSTYIISLIKMEDIIKFSGPIFIAFLSSPILLYSLVGSVWFFIFNKLPKFNKFIIKYLSIPMFLSFIVSFPISLYVDYKLKSNGYVVCDRISWMSPNTYVKDLSLCR

SEQ ID NO: 78568 - protein, 152 aa, Yersinia pestis
MPENNINTYCIQEGTLECPEGFTDRTVNLFMKGKPGAAFALNIARDVPEAHEVLSDYVQRQIGILKDNLKKYEVKKHQQIDVGAQHIPGEYVEATYMAETRRVWQRQVAIQVGDHMMIFTATNASPFNPQQQATWEQWIHSFAPWAREAGHV

SEQ ID NO: 78569 - protein, 261 aa, Yersinia pestis; identical to SEQ ID NO: 78459

SEQ ID NO: 78570 - protein, 59 aa, Yersinia pestis
QITLPLQKEMGFYGVRNTAQAGNIILSSPAGRIRLVISSRGRIRLCSEQQSMAGIHLCL

SEQ ID NO: 78571 - protein, 59 aa, Yersinia pestis
MAKTIKVTQTKSSIGRLPKHKATLIGLGLRRIGHTVEREDTPAVRGMVNLVSYMVKVEE

SEQ ID NO: 78572 - protein, 171 aa, Yersinia pestis; identical to SEQ ID NO: 78548

SEQ ID NO: 78573 - protein, 78 aa, Yersinia pestis
MSTIEERVKKIIVEQLGVKEDEVKNSASFVEDLGADSLDTVELVMALEEEFDTEIPDEEAEKITTVQAAIDFINANQQ

SEQ ID NO: 78574 - protein, 103 aa, Yersinia pestis; identical to SEQ ID NO: 55649

SEQ ID NO: 78575 - protein, 100 aa, Yersinia pestis
MIREERLLKVLRSPHVSEKASAAMEKNNTIVLKVAKDATKAEIKAAVQKLFEVEVEDVNTLLVKGKSKRHGQRVGRRSDWKKAYVTLKEGQNLDFIGGAE

SEQ ID NO: 78576 - protein, 63 aa, Yersinia pestis
MKAQELREKSVEELNTELLNLLREQFNLRMQAASGQLQQTHLLKQVRRNVARVKTLLTEKAGA

SEQ ID NO: 78577 - protein, 122 aa, Yersinia pestis
MSTITKDQILEGVAALSVMEIVELISAMEEKFGVSAAAVAAGPAAAVEAAEEQTEFDVVLASFGENKVAVIKAVRGATGLGLKEAKDLVESAPAVLKEGVNKDEAETLKKSLEEAGASVEIK

SEQ ID NO: 78578 - protein, 343 aa, Yersinia pestis
MIKFISTSIISLEFYKTSLKKSFIAISALPLLMSSMAWAQPDVVRLGNLKFAHYGAISYMKEIAPKYNIKIEERMFAKGIDIAPAIVAGQIDIAASAVDAAIAARAQNIPIYVIAGFAKGGARIVIGNNSSIKSVADFKGKKVGVARGGAQELLLLAELDKYGLTWSDRPGKDVQIIYMAYADLNQALQSGNLDAISQSEPHASQAINIGYGVELLKPYDTPVGVPIRALIMTEAMYKEKPEVAARVLKLFVDATNTFIQQPEIAEEYVRKEMFKNQITSQDYQDAIGNSPFSYDITVEHVQVTTDLMRKYGIGRMNNPPVAADWVKNDLLEAAKKSIGVNGS

SEQ ID NO: 78579 - protein, 128 aa, Yersinia pestis
MLLRSHILLKSNVLLKIKTLLGLSAVLVLAGCSSSNTLSSAGEQVKFSDTQPGSECQLVGQVTGTQSNWLSGQGGESSSMRGAANDLRNKAAAMGGNVIYGATSPSETFLSSFAPLESKMVGQVYKCP

SEQ ID NO: 78580 - protein, 128 aa, Yersinia pestis
MAYSEKVIDHYENPRNVGSFDSQDPTIGSGMVGAPACGDVMKLQIKVNEAGIIEDARFKTYGCGSAIASSSLVTEWMKGKSLDQAEAIKNTQIAEELELPPVKIHCSILAEDAIKAAIADYKSKHTAK

SEQ ID NO: 78581 - protein, 89 aa, Yersinia pestis
MSLSVEAKAKIVADFGRGTNDTGSSEVQVALLTAQINHLQGHFSEHKKDHHSRRGLLRMVSTRRKLLDYLKRQDVARYASLIERLGLRR

SEQ ID NO: 78582 - DNA, 99 bp, Staphylococcus aureus
tatgccttgtgactggcttgacagcttttcctcagctccgtaaactcctttcagtgggaaattgtggggcaaagtgggaataaggggtgaggctggcat

SEQ ID NO: 78583 - DNA, 100 bp, Staphylococcus aureus
ggcttgacagcttttcctcagctccgtaaactcctttcaaattgtgagcggatcacaattgtgggaaattgtggggcaaagtgggaataaggggtgaggc

SEQ ID NO: 78584 - DNA, 52 bp, Escherichia coli
gtctagcataaccccttggggcctctaaacgggtccttgaggggttttttga

SEQ ID NO: 78585 - DNA, 49 bp, Escherichia coli
agcttcaaaaaacccctcaaggacccgtttagaggccccaaggggttat

SEQ ID NO: 78586 - DNA, 17 bp, Escherichia coli
tgtttatcagaccgctt

SEQ ID NO: 78587 - DNA, 18 bp, Escherichia coli
acaatttcacacagcctc

SEQ ID NO: 78588 - DNA, 23 bp, Staphylococcus aureus
cagcagtctgagttataaaatag

SEQ ID NO: 78589 - DNA, 18 bp, Staphylococcus aureus
tgttttatcagaccgctt

SEQ ID NO: 78590 - DNA, 26 bp, Pseudomonas aeruginosa
gtcggcgatataggcgccagcaaccg

SEQ ID NO: 78591 - DNA, 24 bp, Pseudomonas aeruginosa
ataatcgagcatgagtatcatacg

SEQ ID NO: 78592 - DNA, 20 bp, Pseudomonas aeruginosa
atgcgtccggcgtagaggat

SEQ ID NO: 78593 - DNA, 40 bp, Staphylococcus aureus
gccggatccttataaagtaacagaaagcgatggtgactgc

SEQ ID NO: 78594 - DNA, 41 bp, Staphylococcus aureus
caggtcgaccagcgcttagaagtctaagtttgcataaactg

SEQ ID NO: 78595 - DNA, 29 bp, Staphylococcus aureus
cctggatccttctaagtggaggatttacg

SEQ ID NO: 78596 - DNA, 29 bp, Staphylococcus aureus
caggtcgacgaattaatcgttaatacgtt

SEQ ID NO: 78597 - DNA, 29 bp, Staphylococcus aureus
gccggatccataaggagttatcttacatg

SEQ ID NO: 78598 - DNA, 29 bp, Staphylococcus aureus
cgcgtcgacttatttaattgcgtggaatc

SEQ ID NO: 78599 - DNA, 30 bp, Staphylococcus aureus
gctggatcctgaggggtgaatctgtttggc

SEQ ID NO: 78600 - DNA, 29 bp, Staphylococcus aureus
ctgctcgagtgcgtattaatcagtaactt

SEQ ID NO: 78601 - DNA, 38 bp, Staphylococcus aureus
gctggatccctggaaggagaaaaaatacatggctagag

SEQ ID NO: 78602 - DNA, 42 bp, Staphylococcus aureus
ccggtcgacggctagctagtcaaaacaagttatattattcac

SEQ ID NO: 78603 - DNA, 30 bp, Staphylococcus aureus
gctggatccagaagaaggaggataattatg

SEQ ID NO: 78604 - DNA, 29 bp, Staphylococcus aureus
ccggtcgacttttcccccttattttttac

SEQ ID NO: 78605 - DNA, 42 bp, Staphylococcus aureus
gctggatcctaaggagtgaaaaaaatggattacaaagaaacg

SEQ ID NO: 78606 - DNA, 44 bp, Staphylococcus aureus
ccggtcgaccaattatacaagtgattttacaacttgttggcatc

SEQ ID NO: 78607 - DNA, 37 bp, Staphylococcus aureus
gcgggatccctaagaaagtaggcatttaaatggagac

SEQ ID NO: 78608 - DNA, 37 bp, Staphylococcus aureus
ccggtcgacgtttattttatctcttacgtcctaaacc

SEQ ID NO: 78609 - DNA, 30 bp, Staphylococcus aureus
gtcggatccaataggaggataacgaatgag

SEQ ID NO: 78610 - DNA, 29 bp, Staphylococcus aureus
caggtcgacaattatgcttcaaatttctt

SEQ ID NO: 78611 - DNA, 30 bp, Staphylococcus aureus
gctggatccataaggaaggtgcaatatatg

SEQ ID NO: 78612 - DNA, 29 bp, Staphylococcus aureus
caggtcgacgttttaaacttctactgcat

SEQ ID NO: 78613 - DNA, 42 bp, Staphylococcus aureus
gccggatcccaaatgtagtcttatataaggaggatattgatg

SEQ ID NO: 78614 - DNA, 38 bp, Staphylococcus aureus
caggtcgacgcttcactgttttgttattcatctatatc
